United States Patent Application Publication US 2022/0282285 A1 - sequence listing, part 2

SEQ ID NO: 57 - DNA, 930229 bp, Homo sapiens
atgtggggagctttccttctctatgtttccatgaagatgggaggtgagtctcaatctaatagtaaatgctgctaggaattttcaaaacaatttcctttcagctaaattattgcaaattttgacatttgtaatgagagtatttcctgaatatgcattttcctaacgtggtgctaattgtcctcctgttactattgctgctgctgttactgcaaccatttatttcagtctaagaaattctcccatcaatggcagttcttttgtgaccacatggaagcatcatttaaaaaattattccaatagtttttggaggaaacatcatttttaataatgatggggcttctgggggtgctgccctagtaacaatcatgtatcttgtcataggcactgcaggacaaagccttgagcagccctctgaagtgacagctgtggaaggagccattgtccagataaactgcacgtaccagacatctgggttttatgggctgtcctggtaccagcaacatgatggcggagcacccacatttctttcttacaatgctctggatggtttggaggagacaggtcgtttttcttcattccttagtcgctctgatagttatggttacctccttctacaggagctccagatgaaagactctgcctcttacttctgcgctgtgagagacacagtgactatgaggcctccttaactgtgccaaaattcaaaagacaatcagtggagtacaggtgggcttgagaagttctagaacttcctgagtgtatctttgcttaccgtctaattttaaacttgtttagaatatgtagcatagggctctgagacggaaccccattattttctgaaccattgattgctaaagagaaggataaactattttctctctctctttcttctttagtttcttcttttcctcttcctcctgcttatttatgcctccagtatcctgtggttccacgtatggaagatggaatttacttttggaggaagctttttatacaagggaaggatcccttggtgagtgctttagtttatgcagtagtaagttacattaatattcatgtatccttgggaggctctgaaatttgtgaagtaaatgcaaattcctcagcttgagatagtatgatttcatttaattatgtcaaatatatcctcatttttgtatttacctgagtgataatgttgatattatttagcattttttggtggatttatccaacatattggagagtgtgggggctgtggacttagagggtgaagagaagatcatggagagctcttctctgtgaaacagaagagtgaggtcatgcgatgaggtgggggtcaagtgtggaaggaattggtcagtagggaattcctgtaaaagcactggataatggacagaacagtaatataaaatattcagtttaaagattttcttttactgaattgtaatttttgtgtgctatcctaaatgtttttgaagtttgttaaacattacagcctacatagtttgtccttagagggcaatgcagaatttcttccccataggtgaattattttttggcttagtacatttatgtatgtatgtatgtatgtatgtatgtatgtatgtatgtatgtatgatggagtctcgctctgtcacccaggctggagtgcagtggcccaatctcggctcactgcaagctccgcctcctggattcacgccattctcctgcctcagcctcctgagtagctgggcctacaggcatcggccaccacgcctggctaattttttctatttttagtagaaagggagttttaccgtattagccaggatggtcttggtctcctgacctcatgatccaccagcctcggcctcccaaagtgctgggattacaggcgtgagccactgcgccgacctctattagctaatttttaatgacttattttggggtaaacagaataagagggacttggtggtagggagtagaaaggtagagtggatggttttcactcaacaaatattttactgaatacttatatgtgctaggcactctttcaattgctatggtgcatcactaaataaaacatacctgcactgaggttgcttatgttcttgtgaagagagagagtaagtagatgttttagcagactttgaaagcacagggaaaatacatttgaccctcagaactcagcttcattttctttaataggaagagagctgagatgtatgtaagcaatgctgatgtcctgtgcttgttataattttataatataaattaatcatcagctgaataagggctgtataacattggatagttataagactgcaagtcaagttatccaaagaatctcagtctttcaaattattcaaatgtagctgtgtctatagtgggactctatataaaatcagaaagatactgaacgtttgaatggagaatctaacactgaggcaaatgacctttaacatgtgagttatttgtaaaaatgaaaaaaatttcgagtgcttcattgaaatcaagaaggagataaagtctaaaaaactttcagcaaggagtgaatggtcaatggaaatgaactatacaaaatcaattatcttaaatttgaagacgtgtaagttactgatattctccttaatcagtatgctatctttttatctttttaatttagtgaccatgaagagtatccgtaagaacttttataggttcattttgaccttgttttcatatctattttctcctaaagtcttaatttttttttttgagatggagtctcactctgtcgcctaggctggagtgcagaggtgctatcttggctcactgcaacctctgcctcccaggttcaagtgattctcatgcctcagcctcccaagtagctgggattacaggtatgccaccatgcctggctaacttttgtatttttagtagagatggggtttcaccatgttggccaggctgatctcgaactcctgacctcaagtgatccacccaccttggcctcccaaagtgttggaactataggcatgagccaccatgcccagccaagccttaagtttttagataacatgtttttctgccacagagattttcaagaagaaagagtaccattctttgttactttctctctctgctagtagagtttctctttaacccagcaacttctttcatttccacctagaaggtggttgaatgctagatgttggagcaagccattaccagaggataggagacaaggtttttcgaattattgtagatcaaactgggaacccagctctcttgtcatgttcaaagagcagtagctgtgtttggacttcggagttagatatttctaagttcaaatccaagcttcacagggtgttcagataaaatctcacagaatgaaagaaacataggaaggattggaaggaatttgacatgtatcaaatctaactatcttctacaatgtttgagtaaagctctgatttttgagcatctctttgaccttgttttcttgagtagttggggatgagtccagcttcaatgtctcttgccttgagatcttacctttggagctttttatatccctcagttcgggcaagatagaacatcccattgtccagttattttctagtcctgtggtatctgtggagtttccagagccacactggtgctcggatgtctggagcatgttctcactgtggaaattaacctcgctttagttctagttcctaaggaagataaccaagagaacacaggtggaagaagcttgcatcaagaagactacactctatcttggaggtgaactgttcactattacatacataactcaggaaaacttagatacctctcttgtttcttttggcttaatggtggtaaataatttaggtgttactgagccctaggttattcaattgtttcttgtggtttctctactcccatatctttgtacatagttcctatgcagagaaaactctccgcaaattatcatgttttgagtaggctatctattgctttttggaaaatcagcaccatccatgtgccttaagagtgatttgcacatgtactcaggggtacagggaagtgaaggaggtcagttggaagaaatacaaaaaccaagatcttcattaagaagagtttaaaaattttgaaggaatagttggatctttttctaagaaaaatccttaagagatttgataatatgaatttggatgggaaataaggagtgtgctgtgtaccactggatttaggacatgagcgctggaggcccagaatgcacacataacccttctcaggcaacccttgaggctgtggtttggatactgaaccaagggtaaaggcacagacaaaagctgacattttgagggatcagtttatgaggtggagtaaaactctaagctggactctgccagtacccttttgaaaccctgtcttttttcctaaatgaggaatctcaattccagatagaaaatgaggacgaatggctcacgcctgtaatcccagcactttgggaggccgagatgggcagataacaaggtcaggagtttgagaccagcctggccaatatggtgaaaccccgtttctactaaaaacacagaaattagctgggcgtggtggcgtgcacctgtaatcccacgtacttgggaggttgaggctggagaatcgcttgaacctgggaggtggaggttgcagtgagctgagatggtgccactacactccagcctgggcaacagagtgagactctatctaaaaaaaaaaaaaaaagaaaatgaggacgaaacacagccttggttgaatgttctgccaggcagtgttctgtgtggcttttgagcaagtgcaagcacataattttcctatttgtcatctttctgaatctcaagcaagtgcttcctgcctggaagacattagttcacatatttgactcacgtatactctgaattttaagtgtattttgactctgcctctacagtggttaccacatgcttatccattatttattattgagttttatatgcatttgtacttttcaactgacccatatccagccattggtcatacatgagctttcccttggctctgttctcctgggccaattctgggcatggacttttaaactcaccttcccattttgacccagccattcctcagttatcccctcagctgaaacttgatttctgtgaatgcacttagtcactgagtgtggggagggaggtgacttgaaaagcaggtgctacatctcataattaaattatgtaatcctggtacttcagaatctcctggtctctgttgttacatttccttatgaacttctgaggggattaggaagtacttcagaacttcctttcctagtaggcatatgtttcttttttttttttttttttgagatggagtcttgctctgttgcccagactggagtgcagtggtgcgatctcggctcactgcaagctctgcctcctgggttcccgccattctcctacctcagcctcctgagtagctgggactacaggcacctgccaccatgcctggctaattttttgtatttttagtagagacggggtttcaccgtgttagccaggatgctctcaatctcctgacctcgtgatatgcccaccttggcctcccaaagtgctgggattacaggggtgagccactgcacctggccaggtaggcatacctttaaataatactactgattaagagaggcctgtgcatgttttgtggctaataagtaggcagaactagaataaataagatttacacttactggtctagacaacttaccttgggaattgcaacctaggtttggggacttgaccttccaagtctgtggactgacttgcaaactaaccatacttttcggcttgctaaccaagtcttgatctggaaagtaagatctccccgaggactgtcagatctacttgggcaatacttttcagtctgcattagaatcacattttaaaattccctatgcttaggtcccatcccaggtcaatttaatcagaatttctggtgatggagccagaactatttaaataaaagtctcccaagtgattctaaatgaaacaaagttggaaaactacagtctcaaaagataaattggactaaacctctagagttgaaaactcacccaaatttattgtacaagggtcaaaaagtggctgagtgccccatctgggatggtgaggcagatgaggggttgctggttactaatattggcattccttcctttcattgtgagttgctcttataacttgcacctgctgctctctagcaacatgagcctgaggtccaatgttaaactgaggcatgtgacacctgtgctcagatcagtgggcacccagggaccattaaagacttttctttcttacactctttgcctttgtgttccttggagaagaacttcaaaagagcaagcccttcctcagggccatcatggtcatctaaggtttagtacacattttagtaatgacacattaaagataacttaaatatacattttttgagggataaatatcaacatgaggaatagaggactcttggccaggtgcggtggctcatacctgtaatcccagcgctttgggaggctgaggcaggaggattgctatgggttcaagatcagcctgggccaatagtgagattcctatctctactaaaaaaaaaaaaaaaaaagaacagaaggctcttaattacctgtccaagctcttcagacaatcaagaccagtccttgtggagattaaaaatttcagaaactaaaagtttgttatagcttggtcattgctctcatgaagcagcataacttggtcctcctagtgctctgtgaatgtgaaaatgaaaactctctttgtctgtgcttctgttgctgttgctgacgtactctccacttgtctggtttattgataattcactctccagtattacactccatcctctggagggaatgatggatcccttcatcacaaaatgttttctgtatttgcactcttctatgattccctgctcatcccttaagacaaacccttctttaagtcccggatgataacaagagtgatgattgcagcactctgtatttattaagtgtctaccatgtttcagaaacttcacattagttatcttattcaatgctcttaataccttgtattggtccattttcatagtgctataaggaactagctgagactgtataatttatgaagaaaagaggtttaattaattcatagttccacaggcttaacaggaagcatgactgggaggcctcaggaaacttacaatcatggtggaaggtgaaggggaatgacacatgtcttaccatggtggagcaggagagagagacagtgaagggggaagtgccacacacttttaaaccatcagatctcattagtatcagttagtatcagtcagttttcacactgctacacttactacctaagactgtgcaatttatgaagaaaagaggtgtaactgactcacagttccacaagcttaacaagaagcatgactgggaggcctcaagaaacttacaatcatggcggaaggtgaaggggaagcaacacatcttaccatggtggagcaggagagagagagccaagagggaatgccacaagcttttaaaccatcagatctcatgagaactcacacactatcacaagaacagcaagggggaaatctgccttcatgattcactcgcctcccaccaggcccctcctccagtttgacatgagatttggccagagacgcaaatgcaaaccatattatgtctcctttgaagtaagtcttattgcccttattatatacgtaaagtaatcaaggtttagaaaggatagttaattttcccaaggacacatagctggttgatggcggaaccaagattcttctaacagactctaaaagttgtactctttccttttcataccaatatatttttaaaaatgggtagatatgctgaaagtttatcaggttttatcattaaaacctggggtcactgaagtaaagctatctttcactaactatctgtaaattgatagtcaactatcctgggaagttaagtgacccgccacccttaatatttagcatgaatcaatttaattagttcctttagtttcttcagacaaatggaagttatcttaaaggggatggaataaaggaagaaagaagcagttgtgcaaaaggaggtggaaataggtctcagaaaggatgctgttgaaatgaaggggcccacttttttttaaatgaaattgctttttaattcagttaagagaataaaagagatgaaatatgcagttatattttcttttatacttacctacataattacctttaccagcactttttttgtgtgtgtgcatagattcaaacggtattgtgtggtgtcacttgctttctgcctgaagaacttcctttattatttcttgtaaagcaatcttctactaacaaatttttccctgcttttgtttatcttgaatgtctttatttagcctttatttaaaactagcctattttttccagagatttaaaagctcactttatatttgctttctttaaccttttattttaggtttgggggtacatgtgcaggtttgttacataggtaaactcgtataacaggggtttgttgtacacattatttcatcacccaggttaaggccagtacccaatagttatcttttctgctcctctccctccctccactctccaccctcaagtagaccctagtgtctagtgtctgttgttcccttctttgtgttcatgagttctcatcatttagctcccacttataagtaagaacatatgatatttggttttccgttcctggttcctccagcatggatggagctggaggctattatccttagcaaactaacccaggaacagaaacatacatctcattcttttttatggctgcatagtattccatggtgtttatgtcccacattttctttatccaatctgtcattgataggcattttggttgattctatgtctttgctattgtgaatagtgctgcaatcaatgcacatttgcttgcatgtgtctttatggtagaatgatttgtattcctctgggtatatgcccagtaatgggattgctattaaatgtaaatggtaattcttcttttagctctttgaaggatcgccatactgctttccacaatggttgaattaatttacactcccacgaacagtgtatgtgttcccttttctccataacctcaccaacatctattattttttgcctttttcataatagccatactggctcaagtgagatggtatctcattttggttttgatttgcatttctttaacgatcagtgatactgagcttttttttgtttgcttgttggatgcatgtgtgtcttcttttgaaaagtgtctgttcatgtgggatccaggtttcatacagcaaacagaagcaagcacaggtgcagcctcatgtttgtttacattgattcagagtttgagctggtttcaccggtttgactcacagttttctttgttgaggctaggtgagttcctgctaacgactctgtaccacacacacacaaatcactcagtatcactcaagattagttctgttttaatgatgaacttagcattcatacatgtaatcctaagagtagttatagtttgtggatcaactcacatatgaccttaagatctcatgtcttctgacaagagcaatatggcacattggcttaagtgccgcatagaagacttgctagaccaatcagtgtcttctagattctattagaaatgctattttttaaatgtccagttggaaattttcaatggcttgtttcaagattaacaaattattgtggactctgtactgccttgcttgtcgtctcatactatgtgtaacatgtattatatgtatgcataacatataatatccttcctgatattatggtgtttctgtatagcacagtgtgattcttatatccacattaatatatttttacctttacgaattttgaatctttccatgcatttgtttaaattttactgttaaaatgggccaacatgataccacacatccaaagaagtgaaaaatatgccagcgaatgaaagaatacatttaccttgtttttggttattcaccaaggaactgtccatgcttgcttttaggttgccatgtagttgaatcttctgtcttcagtttcccttaaatgttctcttttttttttcttttttcaggtgagaccaggacaggtaatcggcagaactgacaataatttcttcagtttaagatacatttcaagagacttttgcagtgcggtttaaattcagcaacaaatggccgggcgcggtggctcacgcctgtaatcccagtactttgggagatggaggcgggtggatcacgaggtcaggagatcgagaccatcctggctaaaacggtgaaaccccatctctactaaaaatacaaaaaattagccgggcgtggtggcgggtgcctgtagtcccagctactcgggaggctgaggcaggagaatggcgtgaacccgggaggcggagcttgcagtgagccgagatcgcgccacggcactccagcctgggcggcagggcgacactccatctcaaaaaaaaaaaaaaaaaaaaaattcagcagcaaatattgatttctgtgtctgctcgtagttattaggcaatagaggcagacaaacacaaatgaatgctttatgtcctttgagggctcacaatccatttgaagtggaaagagagataaattccttttttttttagacttttttttttttttttttttagatgaagtctggtactgtcacctaggctggagtgcagtggtgcaatctccgctcactgcaacctctacctcctgggttcaagcaattatcctgcctcagcctcccaagtagttgggattacaggtgcatgccactatgcctggctaactttttatatttttagtagagatgggggtttcactatgttggccaggctggtcttgaactcctgacttcgtgatctgcccacctcggcctctcaaagtgctgggattacaggcgtgagccactgcgcccggtaggagataaattcttgactgtaatacgtgacagactggggcaaggtctatactaaagaagccatggcaataccagggaagaggagttaagtcctgcctgggaaaaacagatgaggaagtatttaatatggatctgaaggaagcataaattgtcacttggtcaatatggagagggaggacttatattccaggcagagaagagagcttgagcaaaagagtacaggcaagtatagagcatgctcacggaacggcaataaatcagtgagggtgggagagggaagcagaggaaatggcttaagagaacatgtatgtgaagccaagattgcattggattttgaattccagattaaggagcctggccttattcattctaccttcgccgaagagtcctacagattctgtgtttcagagggtaattttgattgtggtctagatgaggaagaactagtcaagaattaagagagacagtctacactgaatcagtttgagctggtttcatagttttgaggagacagaatctgatgtgttagcacatcacgagggcgagggacaggaagaaaacacaaataatccagaattttcaagttcaagtgcttggaaatattcatgccatgcacaagcaaagaaatggaatttagaggggtctaggattaggagcaaagacaatgaaacaaggggttatggagccccctttttactcttttcaaattttctggcatgatatactttctaagacattgacacattctcatcttattcaacctttggtaaggcattttctcatctcacaagatagaggtgatagaaataatgtatccatttatttctaaaagattatgtaaaacaacctgaaccagtttaattaggggaaaagattttgggtcgaaataattcagaattttctgccaaagaaaatgaaaataaattcactttaaatccttagcagtttattgggcatttgtcacatgcagcagtagctgaagagagtggcagtgataatgatgcagatgtagttacttattttcattcagtccttcaacctgctgttatcctcttcagggcagacttcacttcctggttcctcagtgtatagatgagggggttcagtaatggagtgacaacagtgtaaaacacagccgctgccccatccagggggtctttggagccagccctaaggtagatgaaaatacaggggacatagtagactgtgaccacgattaggtgggagccacaggtggagaaggcccggcgcctcccatcagtggtgcgtatcttcaggatggcatttactatgttggcatacgagagcagaattaacatgaagcaactggcggccactaccccgacgtccacaaaggtcacaagctcattgacagttgtgtcagcacaggccagtctcaatactgcggggatgtcacagataaagtaatccacctgattgggcccacagtagggcaggcggaaggtcaaggtggcctggatagacccatgcatggagccggcgacccaagctccagccacaaggactgtgcataacctcccattcatgagcactgggtagcgcaggggctgacatattgccaggtacctgtcataggccatcaaggtgtagaggaagcactgggtgctgcccaggaagtgaaagaaatacagttgagccacacagccaccaaacgggatagccttgatggaaggagtaaaatccaaaataagcagaggaacggtgactgaggagagccacatgtccaggaatgagagcactcccagaagaatgtacatggggcgagcacagagcttcgggtcagcccacatggtgagcagaatgagcaggttccccagctgagtgaggatgtaaatgatgaagaagaccaggaagaggaggcttcttagatttggggggtgagacaaacccagaagaatgaaatctgtcaccacggcatccagcgatgtgtttttggtctttcccatgtctttttgtagtctgctaagatgaatggtgacgtttgacaagagaaacacagcacaatgatgttgtaagtgaatgcttttgtcggatgattgatgcctaggaattatgagataaacaagatagagtcaaattgttttttaaaagaggaggtggtgtcaccattagttatttaggtttacttaaaaggagaagtcctccagaggctggttagtttcctagatgggaggaaactcttgtccattgagagatactgaaagccaggatttgccagatgaaggaagagggacacatgagagtgatagagaagtaccgaaaattccaaccaaaaagtgagttcgccaaggaggggctaaagttgatgcagagcagtgtggaacaaacaccctataatgaccacatctactttttcttcacctactatcattgtcccctttttcctcagctaaaatctcatctccttaacatatcatgcaaaaatattcctcatctggcccttatttatatcgctattgtaccacttgtaattccttcttattgttgggaggcatgacactcttcaagcttctcacagtagtgtgctctaacttgggacttacgcacacactatcttttctgctcccttcacataggtagtgcccacttttccttcaggattcagtttgagtgtcttcaccttcaagaaggctttccggatccctgaggacaatgcttatacttttctgagcacgtacattatgttgcattgtctaatttctgtttttctctcttaataatcatcccgtctagcatgctaaaagtgataaataccgtaattattttctgaatgactgagatagatagaatggatgttgccaaatccccctgactgaatacattgtttctcttgatcttttttgtctgacccctgtgctcacatggctgggacttttaggtcaagggaccacctcattcaccatgtaatatgggtataatttcattataaaaaactccaagaaacatttatgcctgtttttgctccaggatatcatttagatttatttgttgatttatatggttcattggtttgggattgggttttttttttggtatgaggtcacagaggaatttttattgtttgttataaaatcattgattaatgcaggacttgatctttagtgtgcttgtgtgtaatatctatgtattgcagtctatcaaacagcaactctctctaaagacatttacagattttcaagtatctgaacaagatgataaaatagagggatggaatgtgtttgtttcactctttttgttaaataggttgcttgataaagacttttcgctctatatatggtttgagatgcatttatctttcatttaactacaaaatatctttgtaatgcaaatgactactttcataaagcaattaaaatgacaatagattattataaataacatgtgaatattaataagtttaatctctatcggaaattctccaaagagattttatcttaagtattctgtgaaataacttaattcatatgttaacattcaagagttattagtagtaataataataatactgaatatatctggctcttcgaagtctggaaaatgttaaacttgtcctttgcccaccaagaacgaagaaatatcagatttttattgcctgagtttcaggaggacactttgatttatttgaaaatggatgggaaaactaaatcttatttttgtggttagaatatagagaaaagaggctgggcgtggtggctcacgtctgtaatcccagcactttgggaggccgaggcaggcagatcatgaggtcaagagatggagaccaccctgaccaacatggtgaaaccctgtctctactaaaaatacaaaaaaattagctgggtgtggtgtcgggcgcctgtagtcccagctactcgggaggctgaggcaggagaatctcttgaacccgggaggcggaagttgcagtgagtggagatcgcaccactgcactccagcctggtgacagagagagactctgtctcaaaaagaaaaaaaaaaaatgaatatagagcaaagatagaaagagttgagattaaaatggtgcataaaatactaattatggccaggcgcggtggctcatgcctgtaatcccagcactttgggaggccaaggtgggtggatcacgaggtcaggagattgagaccatcctggctaacacggtgaaaccccgtctctactaaaaatacaaaaattagctgggtgtggtggtgggcgcctgtagtcccagctactcgggatgctgaggcaggagaatggcgtgaacccgggaggcggaggttgcagtgagccaagattgcgccactgcactccagcctgggtcacagagcgagactccatctcttaaaaaaatatatatacatatacatatatatatatatatatacttattatgagctaaaagtaattttcttttctttctttttttttgtgtgattgagtcttgctctgttgcccaggctggagtacagtggcctgatctcggctcactgcaacctctgcctcccagattcaagtgattctcctgcctcagcctcccaagtagctgcgactacaggtgcgcgccaccacgcccagctaatttttgtatttttggtagagagggagtttcaccatattggccaggctggtcttgaactcctgacctcatgatccacccaccttggcctcccaaagtgctgggattataggcgtgagccaccgcgcccagctgagctaaagtaattttctttgccaatacaggaatataaactagtaggcttctacttaggcaaataatatattcatgaaatgttttatgaaaatccatttttatatttaaaatcagatagaactgtaccactggggcaattatttgaaggacttccatgatgcatactttcgtatagtgaaaagtttatccctaatttatctactttgccggtctgattttcccccttttgttgtgcctaagtctggtttcatttctcccaggctccctgttgaaagaaagctctttttacccctctaggttctgggttccctgcctgggaggaggcaggaaactgagatgggttatagctggtcggtttgaggacaggatacctttccaggcagacttggtaaagaacagtggttttagcttggtgtttggtattcagaggctgcagaggaagatagcttagacttccagaaggtagatttttggagaaacaaagagtgtgtttacagaaggattggctttcttggcaagagaggtgaacagtctgggaccaccttagaggagacaaaagaaaggccgggcatggtggctcatgcctgtaatcccagcactttgggaggatgaggctggagaatcgcttgggcccagaagtttgagaccagcctaggcaacatagtgggaccctgtctgtaaaaaaaattttaaaaattagccaggtataatggtgggcacctgtagtcctaatttctcaggaggctgagacaggaggatcactggagcctggaaggtcaaggctgcagtgagccatgatggtgccactgtactccttcctgggtgacaggttgagaccttgtctaaaaaaaaaaaaaaaaaaaagacaaatgtagaggccgtatttgtgtatcctcttttccccctcccttatcttccagatttgtgtcattttattttaggtctgttcctcttttttagcttttgaaacttatgatatttaagataaggaaagttaaatacaattttagtatatctaccctagctaattagataaccaaaatattctaaaattccccaagttttagactgtattggatattctccaattagataggtcagaatttaaataatcaaaacacatgaaaataacaaaaagttaaagttcaatataaaaagcatctgaaaataagagcccagtgacatcagagaataaacagcatatttttacaaagcaattatcctggaaactctaagaagagactttgggaatggggtgaaagagtagcactgagaaggtaaggacagggagggtcaagaacaccttcaagggacctctatggcattatgggatcacaggataagctgctttctatgcccctactctgccccaaatcaagctagtttgatatgtgaacacatttcttgcagtgtatttagagaggtgccgaggagggcaagcctctatccagcaatttgaacctagatttctacagtgacctttgggatctggactactatgcaacggttatgaaatcttgaagatgaggagtgaaggctggtccagcattgcgttggacacattatgatcaaaggactcctgtttacccttgtgacaaaactcaacccaatctgcttccaaaaagaagtttcaccttctgtcatcctttattcagagttagacatcctggtagagctagggcagagtagaggaaatggatagaatttgaggtggcctagacatattttatcgaattcacaagagtacattctttcctattaccgggggttaaaaaaaacgaacttgctttagaaaaagtacttagtgccctcttcattggagaaggggaaggttatgaatccagcctttctttgtgtttgcacaatcactgaagaatattcttcaagacccctatgactttatcactgcccaactctgccctttatcactgccctaataaaaagagaatatgaaaagaaaatagtgttgtaatgcttttttttgagtcattttctcaacacaaaaagagtttccccaagtttgaaaagaaggaacttaattctagcccgtttgggaaagagttgaggaaacgcatggagaaaagagacggattaaattaacactcggacaaaataacagaaagtcttaaagttccaaaattagtctgcagccttattttgaacatagctggtgtcaggcctgctttttccatccttttagactcacttgtatagagctgcacaattgtggaggaggctggctgcccttgagtgcaacggtccagcggatggagagatggtcttcagagattcagtctagcctactataaagggctcccacatctgtttcggaaagcctttataatttttttttaaggagtttggcccagcaaataagtgttcagaatctttgagaacgcctgtctttggggttcttggacaagtgtgacttctgtatatattcagtcatattttatatcagtttccatcagctgttgcttttttggattaaaagaaaaaaagacactgccaagagatttaaagaaaaattctaacctcgagggaaaccctactactctgaagtatgtccctaatgagatctttcctcaccaaatcctcattattttgttttgagagagagagctggaaatgtttccagtaggatccctggataaggaactgtggggaataaccttgtttgcatgttatttgaatgacctctaatttcttagaggtgttatgaagtctcaactgatccccttccctccccaaatactcatcaggattccaccatcatcttcaggtttctgttcaggcatcacctaatcagagaggtttctgttgactctctcctttcccttccctattttatttttctctcggcacttgccaccatttgacatactgtatttacttgtttgtttactgcttgtctcccttcactagaatgtgggttttgcttagctttgaatccccagcactactagcatagtgcctggcatgtaataatttctcaatatgtacttctgaataaattaatagttgaaactgccacacatgttaaatgctgtgggcagaaaaaaaaagctgtggtttcaaatataaatctaatgtttaaaattacctggagtagatctgacatcaaattgatcctcgagtgacctgcatataccagggcaagtagcttcggaaatctatttattcattttttcatatttaatgttgggcagggcacagtggctcatgcctgtaatcccaacagtttgggaggctgaggcaggaggatcgcttgcagcctggagttcaagagcagcctgtacaatatagcgagacctcatctcaacaataaaatacaaaaaattagctgggtgcctgtagtcctagctacatgagaggcagaggcagaaggagcgcttgagcccagaaggttgagcctgcagtgaaccatgatcccgccactgcactccagcatgggcgactgagagagaccctctctcaaaaaaaaaaaaaaaaaaattcatgttaatctaaataacagtgggaaattgactacaaatgaagatatgaagcctggagtgtgataaaagcttcaagagtttcaagaacttcccctgtaagatgatggagctcgacaaagactggatgatttctaagtttcttttaattctaaagtaagaaaatgttaggcgtgtgtgtgtgtgtgtgtgtgtgtgtgtgtgtgtgtgtgtgaagttgcactgctacctgttgccacaagatgacagtatcatctttattgaaacaaagtacagttgctatatggagtaaatagaaataaatccagagagttcatgagggatataaattactttggtaaagatattatatgtgaggcattaattagtttgggaaaactatgtatcaaaaagagttaacttccttttgtaacacatgggaaatagtttgaaatatagttttcttcctccctccgtcttttccttcctgttttacacctagtcttcctccttccttttttattctttctttttctttcttccacattctcagtttattatgtaacaaatttcaagtcaaaggaaacagagatatataagaaaaagttaacattttcaccatttcttttaatttcactcatctgaagaaactaatttttttttttttttgagggagttttgctcttgtcacccaggctggagtgcaatggtgtgatgtcagctcactgcaatctccacctcccaggttcaagtgattctcctgcctcagactcccgaggagctgggattacaggcatgcgccaccatgcccggctaattttgtattcttaatagagatggggtttcaccgtgttggtcaggctggcctcaaacgcctgaccttaggtgatccacctgcctcagcttcccaaaatgttgggattacaggcgtaagccactgtgcccggcagtaactaatgttaatagcttttttctcatttcttcctgtatattcgtacatgtacatacacctacagacatacaaattatgtttcttttgaactttaaattaatatctgatcatctgttgggagacaaatttagatggttgaaaactctctgtttcttccttattgtcacaaacaccaccaccaccactaccaccaacacacacacacacacacacacacacacacacacacacacacaccccacctctaattgcaaccttgtttccatttcttcctgtcttgagaagagaaacacttatggggaaattgaatactttgtctttttttttttttttttttttttttttgagacggagtctcactttgtcgcccaggctggagtgcagtggcgcgatctctgctcactgcaaactccgcctcccgggttcccgccattctcctgcctcagcctctcgagtagctgggactacaggcgcccgccacagcgcccagctaatttttttgtattttttggtagagacggggtttcaccgtgttagccaggatggtctcgatctcctgacctcgtgatccgcccacctcggcctcccaaagcgctgggattaaaggcgtgagccaccgcgcccggcctactttgtcttatgttattcccatttgccgtctctgttccttatacattatgctttttcaactttaccagaatcacttggattaaaacccgtggatttctcagtaggaaatgttcatgtgaagacacttctgtagtaacagaacctacagctgctcctgtagaaggaagttgaaagtcatcccttcaagaaaggggctcctccccttgtaattctactgggttttgcatccagactgagtttccttccctcacccacatgaagtgtctaccttctgcagactccaatggctcaggaactgggaatgcagtgccaggctcgtggtatcctgcagcagatgtggggagttttccttctttatgtttccatgaagatgggaggtaagtctcaatctaatagcaaatgctgctgggagttttcaaaacgattttctttcagctaaatgattgccatttctgacactcgtaacaaaagtgtttcttaatagatattttctttatgcggtgctaattgttattggatatcaaataataacgactttgctgccatttatttctaagaatctctccttaatggcaattcttttgtgaccacatggagacatcgtttttaatgataatgggtttccaggagcgctgccctagtaacagtcatgtatcttgtcttaggcactacaggacaaaacattgaccagcccactgagatgacagctacggaaggtgccattgtccagatcaactgcacgtaccagacatctgggttcaacgggctgttctggtaccagcaacatgctggcgaagcacctacatttctgtcttacaatgttctggatggtttggaggagaaaggtcgtttttcttcattccttagtcggtctaaagggtacagttacctccttttgaaggagctccagatgaaagactctgcctcttacctctgtgctgtgagagacacggtgactatgaggcctctttagctgcaccaaaattcaaaaggcaaccacagcagcgagaagctgtatttcctgagtgtatgcctgctgtgagttaagactggggactttggaaccagactgcctggatttgagtttgctactctctagttgggtggtcttaagtcagtcactatttttttttcttttggtttatttccttatccagaaagtgagaataatgagtatctacttcacaagcctgttgtgagttatgactctctgtatcatctatatctctatctatagctatatctagtgttactcagagaagtagtggcacacagtaaactttatttaagtttagttatttcaattctagtcttgaattttcactaagtattacgtggtaggacctctgagactggaactcagtatttctctacccttggtttgtggaaggtgaaatcctgaccactatttgtatcttgtggatctaaagctccacctaatgatggagtttgtcgttcaggtggattgttgctttggaaggatcactgtggtgatactcattttctttggggggactccgaactttggaaatccaaatgcaaatgcttcagagtgagatgttaagtagcctgattaattacgaaaggctatcttcattatgtgcatcctctataaataaatgtaatcttaacatattttggaggtttataactcagactagaagtgaagtttaggggcttcagacttggggagcatgaacataatcaggggagtctatagaagatgggaaaaagaatgaacataaacaatttggtggcaaatctgggtgaggcaggagagccagtaggagattcctatgacaagatgcagtcagtaggcattaagcacaataaaaatttacagtaaatgttaagattttcatttcctgctttataattcccttatgttctcttcaaatcttttaatgaagtctgttaaatgctacaacttgctgtcagctaggtttagagagtacacgattgctgtgtggctacctccacatgagataaagccgatcagagtgcagaagctcagattgcaggttattgggacatcaaaagtgagggctgctccaagttaacatagttatatggccagtcatatgttacatatatatatattttttgagtcaaagattaagcaaaattctctttgggtgagataggagtgctttttcattctaatttataaaatgaacatttgaggtggaatttgaacagacatagtcacactggaaagtaatcttgacaacatgaatccaggccactgaaatgttcatgttccttttgtctaataattcatttttttgagctctcatttaaataaatgcaggctagaaatgaggctttgtttttttccagtttacaagacaaccaaagaagccatagaaatgatatttaagggctttggacttggtgagtatgaattgttcatatagttatcaattagggaaaacaatactatgcaaatgatatggtgaatgctatgatcaatggaatattttaaagttgtattagtttctattgctgcataacaaattaccacaatacccatatattagcttgtagttctgtaggtcataagtccaagcaagttcagctgagttccatgcttagggcataaccatagtaaagtcgaggcattggctgggtgagtactcaagtgctcacacagagttcagagtcctcttccaagttaattctttaaatttttttctattttatatatatatatatatatatatatttttagacggtgtctcgctctgtcacacaggctggagtgcagtggcgtgatctcggttcactgcaagctctgcctccctggttcatgccattcttctgcctcagcctcccgagtagctgggaatacaggtacccgccaccatgcttggctaattttttgtatttttagtagagacagggtttcaccatgttagccaggagggtcttgatttccctgaccttgggatctgcttgccttggcctcccaaagtgctgagattacaggtgtgagccaccgtgcccggcctattttttatatattttttaaaatttagagacaaggtgtttctctgttgcctggggtagagggcagtggcatgatcataggtcactgtgggatcaaattcctgggctcaggaaattctctcacctcagcctcccaagtagctagggctataggcacatactaccatacctggctaattaatatatatatttttgtagagacagggtcctgctctgttgcctaggctggttttgaactcttgagctcaagcagtcctctggactcagcctcctgagttgtgattacaggtgctttttttttttcttttttttttttcggagatggagtcttgctctgttgctgaggctggagtgcagtggtaggatttcagctcactgtaacctctgcctcctgggttcaagcgattcttctgcctcggcctcccaagtagctgggattacaggtacctgccaccatgcctggctaattttcctatttttagtagagacaaagtttcatcttgttggccaggctggtctcgaactcctgacctcaagtgatccgctcgcctcggcctcccaaagtgctgggattactagtgtgagccaccatgcccggccagttcttattattgtcagaattctagtccatgtagatgtgggactaaagttcccatattcttaatgtttgtgggctgggggcatttctgagctccttaaggcaacctgcactctttctcatgtgagtcccaccatcttcaaacgagcaatagcatgtgaagttcatctcatgcttggaatctttctggcttaatcttccaaagttcatgtgtttttaaggtctcatgtcaaccggtacatagatatctcccttttgaaaagtcaactgtgggcctggtgtggtggctcacacctgtaatcccagcactttgagaggccgaggcgggtggatcacctgaggtcaggagtttgagaccagcctgaccaacgtgaaaccctgtctttctactaaaaatacaaaaattagctgggcgtggtggtgggcgcctgtaatcccaactacttgggaggctgaggcaggagaattgcttgaacccggaaggcggaggtttcagtgagccgagatcttgccattgcagtccagtctgggcaacagaacgagactccatctcaaaaaaaaaaaaaaaaaaaaaagtcaactgtttgttcagcgcggtgcctcacgcctgtaatcctaactctttgggatgccgagttgggcggatcacttgaggtcaggatcaaaaccagcctggccaacatggtgaaaccccatctctactaaaaatacaaaaaagttagctgagcatggtggtgggcacctgtaatcccagctactagggaggctgaggcaggagaattgcttgaacccaggaggctgaggttgcagtgagccgagattgcaccactgcactccagtctgggggacagaggtgattctgtctcaaaaaataaaataaaataaaataaaacaaaacaaaacaaacaaaaagtcaactgtgccatagaacccaacacaatcaccagagtaatattgcataacattcaagattctgaggattagggcagggaatcttgggtctattcactgaaattttacctaccacatagcaaataaaggatgtccattaagactgcataaaaatggtgaactgcttatgatataacaatgaatcaagaaaaccagtgtgcataattgaatatgcggaataatcacagctgtgtaaaaacttttgggcatagaaaaacagggaaaggaattacaatcttccctctttactgcatttcccttactcaaagtcttagtatgggtagattttcttctctctctctccctctagtctcttggctaggattggagggtgcacttccaagatggcttgctcacatagctgttgttggcaaaagtccccagattcttatcacatggctgtagtgtgttgacagagagagagacagagagagagagagagagagagagagagagagagccatcttttattgtccagtctcagaagtgttataccatcacttctgctgttttttttcccccagcttctaacatttttctccttttacatataacaaagtagaagaaataatataggattcaaactgcaaaagtagttaatcagtagaatgtatacacacacaaaatatccccataagaagacaggcttatttacaatgaagaaacacatgtacatttaagatagttctcatataaaacatttaaaaaataaaacatatcccacaatgggcaccactgtttacagcaatattaaaggggagaaaacaacactcatttaatggtgagcattaaatgtaaaggtacagcatcagtggaataaattcacaaaactatattacagcttgttaatccatttaagaattgttccaaatatatcatatatttggccctcagaggttcattcctacagatttcaactactgtaaatttctagctactgagaggtagaaaatggttattatcatgattataatgattattagaaacacacacacacacacacacacacacacacacacaaactcaccaaggagttacaaaatctatggagaccagaggccaactatcatcacctcatgtctgctctcaccaacagccttgcatttttcagagaactatctaaaaaaatagtcagacaccagtgtgatcactatctcctatgccaaacctattgggaatgaaacaagcagtattaccataaatgagaacattgaggcttacctttcaaggcttattctggtctcagaaattaattagatacgattattttctattgaaatgaattttagctaacataaaagactagtcctttactagctggtcttagggtaaaggtcgtacacatgagtcttaacctactctctgtcatagctaaagtcagctgaaaatccaaaattaaaagtatgccaaaaatcctaagtacaatcttttggaagtctgctgtgaaaaagcctttaaggatgtactaacttgaagtctaagtgcaaggtcataagagctctaacgctgttagatcttcctcgtttgggagaaaggatcaatgttccctacaaaacgctaagttttgcataaaggtgaaacctacatatactagggtatagaattaatttaattttgttccatcaggatcctttttccatggtaaaaaagcagaatgaggaatgaaggaatgaatcttttttttttttttttttttgagacggagtctcgctctgtcgcccaggctggagtgcagtggcgcgatcagggctcactgtaagctccgcctcccgggttcacgccattctcctgcctcagcctcccgagtagctgggactacaggtgcccgccaccacgtccagctaattttttttgtatttttagtagagacggggtttcacagtgttagccaggatggtctcgatctcctaacctgtgatccgcccgcctcggcctcccaaagtgctgggattacagccatgaaccactgcgcccggccgaggaataaatcttaattggcctcttcatcagaagaggtaaacttggtctctgtattcatgaagctagacagttttttaagcaggcagtggaagcagacagtagaacaagattcctgtagccacagaccactacctggtatcaaactaaagcaaggatcaacttaaacaattatccaaagtcattttaactgtactaaagggtaaagttcaccactgtattattttaaaggaagttgtttaatgtaagaattccattaaccctgggtgagaaaaatcaaaacaagtcatactctctaatgagttatccatgtaagaccaccaataaaaatgcttttaactgtatttgactcgaagacacttacttggtaagtgtgaatttctttcttttttttttcttttatcccattggatttagactattgaataattaagggtagagtgagggagaacaaagagctacttctttaacattttagtatctggatagtatagcagaaactgttcctagggacaatgtatatgccattaatcacattgaataaagtggatgaattattcatttttcttttctttttgttcgagaagcttgtttatctccctttggcctttccagtgtggtttgaaatgattccgtgttggtttagttgaggaagcaacagtaagaaagtcactgtcaggtagctgagaagcaggttgtggacttgctgtcccatccaaacaactgcagcgagataaatgatcatggccatgaaacacatttcaggcttttcttccttcagtgcgaagatttgtttccaccagtccatagctctgcattgagtttttagtagattgctgcaaatttcatggaatttttgctgttgattgctggtgcatttattggagccaaaaatgttaggtgctagaatgggaacaaggtagtcagccaagcaccaaaacacaacaaaagaggaaacagcagacagaacagatggatctagatagtagataattgaagcaccaaagaaaccaagtccatgatggcaggtgaaaaccaagctctttcccataataagactttatccaccatcaacatcacttttccccattcttgcagctattgttctaaacttgcagtctctgcagccagcaaattggtgccgtggttacctccctctgccatcatccctgaagtgctgtctcagcaagcacaaaccaccctccaactcagccttcctcctgagatccacagggcgattctggccacttctgctgtattctgttggtcacacagacccacccttatacagtgtagaaggcgattgcacagtggtgtgaataccagagatgatggagatcattgaggtcatcttgttgactggcttccatttaccaactcctgtcagccattggttgaaggatattaattttattaattaccagggatattaattttctagtattcagggtttactatgtacatgggcaaagaaagcgccagttgccagaaagatcccctcaggcacagaggtgctgacagttgaaagttgggccgtccatggaaaatgtaaacgggttatgcagaggagggtattgatagtgtcagtcaacccttccactgctttgataccctcttacccaacattatatttgctttgtactgtcattgattcctcaaggtggtggctgattacagtttcttaaaaaaaaaaaaaaaaaagacctaaaacagaggatttagccagataagtagagttgttgctgcagttggtcccaagaccatcactgttatctattgtctccctcttctatcactcattctaggctccctcattcagcattcctgctggtctcagtttcttgctctttggtgactcagaccttcatccctgaagggcccaagcccctggttactgtacccttttcagaccttggttgatgcaattacctcttcactgctatcaccaagcatggaaacaccaagacatgttccaatacatctctgagttccattggtacttctctctatccccgttacatagtagcaactctatatcctcatgatagtagtcaattacctctgccactatagttttgccaaatttggggagttttcaggcattatttctttgaatactttttcagtcccacttctttcctcttaaactccaatgatatgaacttagatctcttgttattatcccataggtctctgaaactctgctcatttttctttcagtctattttctccctgtttttcaaactgagtaaattctattgatctgtttaaagtttacagattcagttctctggcatctcccctttatattaaatctatccagagagctttttaatttcagttattgtatttttcagttctctggactcagctgctgcctcaaattcctgggcttaagaaatcctccttcctcagcctcccgagtagttggaactacaggcactcaccaccacgcccagctgattttcaattttttgtagagatgggatctcactatattgcccaggctggtctcaaactcctgggctcaagtgatcctcctacctcagcctcccaaagtgatgggattataggcatgagccaccatgcctggactcacttattgaagcatttttgtgagagctgttttaaagtccttttccaataatttgagcatctgattcgtcttcgtattgaatcagttgattgtcttttctcatttatgttctgatttcctaattcttggaatgaaaagtaatttttgattgtagcctggacattatgggttttttattaggaaacctggatcttatttaatcttctttttagcaggtagttctcctgttgagatgtagtgtaaagtttggtgaatatatatgttcagtttcctgctgggtgccactggcaccaccccaccaaaaggggaccattaagtcacattgccttattgcctctgaatggagatgatcagctttctgctgggccagctgggagaggggaaaggagagggccaactagacttacctcctgcctggttggtatggcaggagtggaggcttagctcaccagtggtccttgttgacaagggagtgggaacaggaactctgattagccctactttccattgctttgttcaattacatggccactggatgggtgtggaggttcagctcctcactgggcattgctgacattggggtgggggaagctgagtgtttactgtctcacctcatagcacctcattctacctcattgttgctaggtagagatggaggctcagctcattgttggacctcactgacagtatcttgctgggagactggagcaccacctgcttctgccatctggggaatggaagatcagctccctgtttggcctgctgacactaccaagggggaaaccagagtgcacagtggcttctattgggaaggaaggtggggtggaagatcaacttccttgctcactgactgagacctgggggtgtggtttatttgttggtgtttagctggagcaggaagggtattgccagaaagatttcctgctgttaggccaccgcctttttccttgtcctttggctagaaggaatgggctttccttggagcttttgttatctatgcatattggtgtctccaggttggaggtttctgtaacatcctgtccagaaatttttttgataaatattagggtggtatattatttttccttttttaaaaattctaatgtagttattgatatgattggtttaaatctaccattttgtgatttgttttctattttccccatttcttctgtgttcattttctttcctttttggtctagattgagtttttttgtatgtttgtttttgggttttattttagtatttaattttatttcatcttcactataatcttattagttatattactttatgttagctgttgctctagaatttagattatacatctttaatatagtataacttcaagtgatattatatcatttcctgtatgatataagaaactttcaaacttctgtttttctcctcccaggctttttgttattactttaatatattttacttctacatgttataaatttcacaatatatttttgctttatatagtcaaaatatttaaaaagcgatttaaaaactgattataaaacactttgatatttttgccttacttataaagattaccttacccagacaacctgtaaagtgtggagaatatagatttatagatattgctttgaacatctgcccaagcagtagaagaggcaaattaggaagtgtttagcaagatgcttctggaagctaagttagttcgaggctgtatatcaggcatcctgggtacccactgactggtaccaatttacttagtgttcatgggtgaggtttcacttgtccatggactttgaatccctggtgtgtatgcagtggttattacagtggctctacaaactaatgtcatgctaattgccaaaggtttggaactcttccatatttgaaggcttctggattttttgtccacttattaaatggctaaatgaatgagactaataacaggaagggcattggaatggaaaacttttaataatacctccgagtattcattgatggcaagttcagttatgtcatgtgatgatcacttcaaaatcctgtgtcagataggtaaaaattccaaagctttcaagcctaaaatttaccctgtgcagaattttgagtttcatgattttatatcctaggcttctataatagggtatcagaggcgaatggaatcattagaggagatacagagtagatggtaagtgtgtgatatatattgagaacatttattttaaacaaataagatagatagtttttatgtataaacaaatgttactgattatacattgaagaatattgctttggactttagaagacagcctaagcttaatagagctcctgggttgattgatttgattttatgatgctgagttttgctatcctcttcctgcctcacctttataatgtgatcatgattattgttacttatttaaggtgggtgctgaggtgaggagaaaggagataataggctctttaagaaaagcttatctcctgagagtgataaatgtacagtggtcttcctaaacttcaccacagtcccatcttgatgatcattgcaaagaaggtaattatattagtcagagttctccagagaagcagaaccaaaggttttacacacatgcacgcacacacacacacgcatgcacacacacacacgcatgcacacacacacatgcacacacacgctgcatgcacacacatgcatgcacacacacacagatgcacacacacacacacgcatgcacacacacatacataaattagtcctttggtatacatgggaggattggtttccaggatgcccctaccaatagccaaatctgtagtcatccctgcagaactggtatatactaagttgaccctccatatacatgggttttgcatcctgtgagtgctgcattttcaatctgcgtttggttgaaaaaaaatctgcgtataagtggactcagttcaaatccgtgttgttcaagagtcaactgtgtgtatatacattatatatataaaatgagagagagagagagagagagagagtcagagatagcttgatttattatgagactgtggattgtgggtttggaaagtttaaagtattcacagcagggctgcaggctggaaattccagcaggagttactgttgcagtcttgaatctagaggcagtctggaaatagaattctttcttcttcttaggacctcagtcatttttcttaaggccttctactgattacatgaagcctcgccacattatggagggcaatttgctttacttgaagtctactgatataaatattaatcacatctaaaaaataccttcaaagcaacagctagatcatagtttgaccaaataactgggtaccatggcctagccacgatgacacagaaaattaactattatagtaattaaagggataaaattattacctgcattccataatgaaaataaagagacttgctcaagtatacgcagagtaatatatgagttggctaaaggagcaaaaagaagcagaatccaaatttatatatgtatattgacaggaaatatgctttcatttgacaatatttattagttctgatgcacaagaatagactaagacaaattggctttgatttgccacagaccccttaaaaatttttgtattttcttaccgggccccatggctccagcctataatcctggctactcaggaggctgaagtgggaggatagcttgacaccaagaactcgagaccaacctgggaaacatagtgagaacttgtctctaaaaaaattcaaaacaccaacaaactagccaggtatggtggcatgtgcttgtagtcccagccactgggaacgctgaagtgggaggattgcttgagtccaggagtttgaagctacagggaactatgattgcaccattgtattacagcctgggtgacagagcaagactctgtccctaaaaaaagttttaaaaattttcttaatacaaaactttaagcttaatgttagtatcaagttatatcccctaaaagtgtgctttctattaatatgaactaaaaatgaatactttttttctataaaaaaatttgttgaatgcgtcttaaaatgcagttccaatggtgcccatggtagttactgattaaagtggtaatggcaagtagacgtagttctgtcttagttggcctgacaaaagtcaaagtattgtaaaggaaaaatgtaaaatttgcagaaaagaaaaaggattaaaaaaaaccaaggaccaatattaaaaaggcgaaaccgctgggcgtgatggctcatgcctgtaaactcagcactttgggaggctgaggcaagagaatcacttgagcccaggaatttgagaccaaccagagcaacatagcgaagcccctgtctctacaaaaaaaccaaccaaccaaccaaaaacaaaaaacaagaaacacaacaaaacaaacaaccaaaaaaaaaaaagcaatgaacaaaaaaacaaaaaattagctggacatggttggtgtgtgcctgtagtcccagctacttgggaggttgagatgggagaatcgcataagcccaggaagttgaggctgcaatgagctgtgatcatgccactgcactccagcctaggtgacagagtgagactctctctctctctcactcacacacatgtacacatacacacaacttaaaaaggtgaaactgttcaaacagaaagccagttactaatatccaaatcagagtgtattttatttcatgttttttaggattttgctttttctgtttcatttctagaaacaattatgagaaaagtgaatgaaataacattatagtaactttataacaattagctaaagcatccctgcacaactggagaaaactggtaagttttaccactacctgcgctgcttgtcatgctttttgtgggtctgcacatgtatgctcatatgtacattacgtacttggtattgagcaagacttgtctgatatgtcacttaagtgtgtgtttagaagtttaatagaagaccttttaatttatgagagttgttttaacctcttttctgtctaaggaatcagaatacttttttaacatgttgctgcctatgaaggcacctgcacacacagacaaaacacacatacgcacaccctccaggattcctcaagatgtctggggttacgacttgtcacctttagagtttgccacagcactgatttctttttcctagttatcgaacactccgtaggttatggagtcttgaggttgtaagggatcaagaccatcacttctgtttgctttttggatttgaatacctagaacagtgcctggaatatagcagacactcacacataattataggatgaatgttgaatgttgaaaagatgaagtcttttttactggcagatggccattcagtctttgtttctaagagcaaggaagtccttacgcagcaaacctgtgctctgaaagtcagtgtacagattagttttgggctgttctggagaagatttggaggactacagttgaggcctggtagctctgctcctctgggatttcttaccctgggtcactctttgggacataactcaccatgactacatcattgtaatgtatggagttgtgatgttaaatgcttccttccttccttccttccttccttccttccttccttccttccttcctttctttcttccttccttcctttctttctttctttctctttctttcttctttctttccttccttccttccttccttccttccttccttccttccttccttccttccttccttccttccttctttctttgtttttctttctttctttctttctttctttttctgtctgtctctctctctctctctctctcccccttcccttcccttcccttcctttctttttttaacggagttttgctcttgttgcccaggctggagctcggtggcacgatcccagctcactgcaacccctacctcccaggttcaagccattctcctgcctcagcctcccaagtagctgggattataggcatgcgccaccacgcccagctaattttgtatttttagtagaaacggggtttctccatgttggccaggctggtctcaaactcccgacctcaggtgatccaccccctcggcctcctaaagtgctgggattacaggcataagccactgcacccagcctctaaatgctttctatgtatgcagaagcaaggacatcattttgttcttaccctacacaaccttcagctctaaaactttcacagcagttttttttttctcagagatttctttcccagttttagttggtaactgagtagatggtctcctcatatacagagaagaatcaaatctttaaaaaataaactaaatttaatatgctgaaagggatttaggagttaatccaactcagctctctgcagccaactattgagtaatagaaaggcctagggacaggagaattgggacagaattccaatcttgccatgcaaaagctgggaaagccacaaaacacctctgaagcttacctgcatcccattttattagggagatgaacctgtcaaaggttagagcgtgttcctatgaacttctgccttgtctcttcttgagggtttaagccctggcattcaatcagtataggcagttctcttatatcagatccatctaagcaagaccttggaagctctggattttacaaatccatttgaggctaacacgataatggtctactgtgatggaaaatcatgttcctcttggcaaaaggagccttctctaagtaacacttctctaagtgggtccttgccaaggattgagcctttagtgctgaaagagagatcaggtagaaacagagacaagaggcagagaaagatagggttggaggtatcattgatgaaaagtaaagatgagtaggctgaaactggggtcagggagtagaggtcactgatctctggaaagtcacgatactcttcagaggtatgatttcaaaaaggggaaagttgttgctgtctacattgtggagctgctgtgggaactctagagctcttggaagaaaggtaaaaaaggtagacaaagagcaggaagagatagatttcattgaccttcagtttttttttttaaatgaagaattctaatatacgcagtatacaatacacaatactgatgtctagtggggattctggtgcttttagctcaattgcccctttgtaaataagatttctgctgattgccttaaaatgggtaattattttgatgtacagatcaacttacccccaaatttttggatttttcataattcttccttgcagtgctactttgaaaatatctttaaaaattttatttattttatttttagacagggtcttgatctgttgcccaggctggcttgcagtggcatgatcatagctcactgcagcctcaaactcctgagcttaaatgtttctcctgcttcagtctctggagtagctaggactatagacatgtgccaccacactcagctaattttaaaatttttgtagagatgcagtgtcactatgttgcccaggctggtcatgaactcctggcctcaagcaatcctcttgcctcagccttccaaagtgctgggaggctgaggcaggaagattgctttgtcctacttttaaaacattaaaaaaattaattcaataagtattcagtgagttcttcctttatgccagttactttgctctgtggatagaaaaatgaatgagatatttcccttccttcagggagtgcatagttggatcttattgctacttaaatcccattttatgtttttttcttttagttctttggttaagaacgtaggctctgaaaaattcaaattccattttagccagttgctgagtgaccatgagtgaattatttaatcttgcaaatattttgggaagcaatttgataataatatattttgaggtataatctttaagctagtaaactcatttctagtaatctattcctaacggaataatatattagagaagttataatcgttcaaaaatatgtattgagcaactgctatgttctatatactttcctagataatttggatgattcatagagcgaaacaaagatccctgtccttttagaatttatattctagcagcaggagaaagaaaataataaacaatagactaaataagtgaattatacagtatattagaaggtgatcagtgctttcaaaaaataaaaaaggtagatcaggataaaggggatcaggagtgctggaattctcggtgagttttagttttatattatgttcatcagcataaaccttgttgagaaggtgatgtttgagcaaagacatcaagggggtgagggagttaattatgccagtggtccccaacctttttggcaccagggaccagtttcatggaagacaaatttttccatggactgggggtgggggcgattggtttcaggataaaactgtttcacctacatcatcaggcattagattctcacaaggagtgcacaatctagatccctcacatgtgcagttcacaatagggtttgcgattgaggatttaatgccaaggctgatctgacaggaggcagagctcaggtggtgatgctgaagcactcacctcctgctgtgcagcctggtacccatctgtggcccaggtgctggggaccccagaattatgggatatctgggggaagagattccaaacagaggaagcagccagtgcagtggccccagagtgggactgtgttttgagtatttgaggaataccaaggaggacaacgtgattggagctgaaaggaagagtggtaggagacgaggtcagagaggaaatgggaagttgtgtcattgagggctttacaggccaaagtaaagacttcacttacaatgtgtgaacagggagccatcgaaagtcttcgaattagtgaaatgatttaatctgatctatttttttttttttttttaaagatggcatctcgctgtgctgcctaggcagaccttgaacttctggacttaagcgatagatcctccacctcagcctcttgagtatttgggactacaggcacgtgtcactgcacccagcttgacctatgttttaataggatttctcactgtaatgttgagaaagattgtaccattatttttaatagtgagaaattagaaacatcataaatggccacaaaggatggactgggtgcacacatttgaatacatatatgtgatgaaatgtcacttggttatacacttatgatataatactgagtgaaaaatagaatataaaattatatgtttataatacaattggaacaaattaaagataacagcagtaggataagaacaagctatgggtattcttctcacttgcttttccctgtgcatgcttttaatactttgttttaaaacaaagtaacccatgcttattatacaaacttgaacaattatgaattataatgtaaaaattaataaaatcctatcatttccttcaattccatacttctagaattaactaatgttaaaattgatgtgtgttcgtcaacaactatcttgtgtccttctaggaataaatatatacaaacataattcatgaatatgtatatatgtttgaatatgtataaatattaatatgttgaagcatatgcatgtacatatatgcgtaaatatatatgcatacacacacaaatctttttcgatttctttcttcctttgttcattcattcctttgtccctcccttcctcactccctgccttctttccttcaaggttcgtaatatactcataataggttcttttgcttaacaatatgttattgacattccatgaattagtagtttgtaatcttggctgcacactggactctccaaggagtattaatagtgctgatgggtccaattgtcagaaattctgaattgatggtttggcatgaggcctgggtatcaaaatttataaaacttctttaagtggttctaatgtgcagccacattgagaaccactgccttaggttatacatatagatccaactcattattattattattcttaatagctcataatattccatactgtggctgtactaaaatgtgtttatctagtcctctattgagaaacattcagtttgtttccagtatgttattctactaaaaagtctttaaacatgtatctttagttctttagttaccagtttctttatttctacaaaatacagtcctataagtaaagttgctgggttcagaggtatgagtgtttaaaattttaattggcactgctagattattttccaaaaagatctcaataatacctacttctagtagcagtgttaagagtactcctttccttatatctttgttaatccgatgaatgacaaaaagtatttgattttctttttaatctattactaattaagcatatttttattcatacttatttgtcatttgaagttctttttctgtgacttaagtatatctttgctcatttttaattgagtcgtttgtcttttcttatcaagttttaagagatcttggataacaggagtattcttttttggttatctatgttacaatattttcttcacgtctaccttttttttgataatttatatggcactatatattttgttattattattatttttttcagacggagtcttgctctgttgcccaggcttgagtgcactggtgcaatcttggctcactgcagcctctgcctccctggttcagttcaagcaattctcctgcctcagcctcctgagtagctgggattacaggcatgcaccactacacctggctaatttttgtatttttagtaaagatgaggtttcaccatattggtctggctggtcttgaactcctgacctcgtgatccacctgcctcggcctcccaaagtgctaggattacaggcatgagccaccacgcctggctggcattatatattttaaattattgagaaagtttaacacgctttatctcatttttattcattatgtttaatattttttcacgttggtaggcctttgtcactattgttcctaatgtaagccccatgacattgttcctgatgtaagccctgtgaactactgttcctaatgtaaacccctaatgtaagcctcacgttattttaaataatactatagttaatatttccttgcatttagcttttttcatagtttgaatgcttacaagtgaaataattggatcaagaatataaattatttttgtggcttgtgataattatttcccaacggttatagtttttggccagccatcagtataaaaagttagggtaatataactttagtatttatacaataatatcatattacgtaatttaaagaagtaagtttcttaagtattttcttagctccattgtgaaggaaggcttgagttctttttcaggctgcctaagaagttaggttcagttcaagtaaaaattgtttttgcatacccattgtgtacaaggcacctactaagtgctgcaaaggataagtcctgtgtggttactactcttaaaaaaattttagtctgggcgcggtggctcacgcctgtaatcccagcactttgggaggccgaggtgggtggatcacgaggtcaggagattgagaccaccctggctaacatggtgaaaccccgtctctactaaaaatacaaaaaaattagctgggtgtggtggtgggagcctgtagtcccagctacttgggaggctgagataggagaatggtgtgaacctggaaggcggagcttgcagtgagccgagaccatgccactgcactccagcctgggcaacagagcaagactccgtctcgaaaaaaattttttttttttgatttagtggagagcaaaaatgaacatcttattttactttattttacaggtcaaggaccataaaagaagcctgagagggaatagataggctttgactgggtcaggaaagttttcttaaaggtagtgttctttgaaatagtcaaagacaaagtgaaggatgaatagtatttttttcttcacctttaagttcatggataagtgtgcaggatgtgcagttttgttacataggtaaacgtgtggcatggtggtttacagcacagatcgtcaggtattaagcccagacctccacaggtgtagagtgggtccacgtgttctcattattcagctcccacttataaatgggaacatgtgatgtttggttttctgttcctgcattagtttgctgaggataatggcttccaagtctatccatgtccctgcaaaggacatgatcttgttcctttttatggctgcataatatttcatggtgttatgtaccacattttctttattcattctatcattgatgggcatttaggctgattccatgactttgctattgtaaacagtgctgcaatgagcatacatgtacatgtatctttataattgaataatttattttcctttggttatatacccagtaatgggattgctgggtcaaatggtatttctggttctagatctttgaggaatcaccacactgtcttccacaatggttgaactaatttacagtcccatcaacagtgtaaaaatgtcccttttcctccacaacctcaccaacatctgttcttctgttgttttttggctttttcataatagccaatggtatctcattgtggttttgatttgcgtttctctaatgatcagtgatgttgagctttttttcctgtttgttggccacataaatgtcttcttttgagaagtgtctgttcatgttctttgcccatttttaatggagttgtttgtatattaatagtaaacaatgaggtgaggagagtacacttgaatagagtgtatgttttctgagcagagggaaaagaaaaagtaaagacaaagattttggaaggtaagtaggtggaggtaggatgcctggaggacagtgacttgcttggtcagagagaagaattaatagggagaataaaaggacactcacattgaaaaaatgaaaatgtgcagcagactgttgcaggctttgaatgtatatctaatttgatagaagagtcaaattatttagttgggagttgtattggaatattagcttaatgttatcagtgctttagtttgaagtgaaaagagccaaataactaatgtgtaaggtttcgggcatttatttattcttgtaaaggctcactgatctcatctgcaaggcagaaacaattgattcatgtgccatagggtggttgtgtttaaatagaagtgcctggcatggctcctggtaagtagtgggtatactgtaacaactactgttaaattgatttcataagctatatgctctgatgataaataagcaattcagataagaatacaaagtcatttcaattagttctattcctataataataaaactaaattagctttcattttttcccccctaagctcattgaatggacagtctaaaccaaacaagagtgactgaatttgtcttcttgggactcactgataaccgggtgctggaaatgctgtttttcatggcattctcagccatttatatgctaacgctttcggggaacattctcatcatcattgccacagtctttactccaagtctccatacccccatgtatttcttcctgagcaatctgtcctttattgacatctgccactcatctgtcactgtgcctaagatgttggagggtttgcttttagaaagaaagaccatttcctttgacaactgcatcacacagctcttcttcctacatctctttgcctgtgccgagatctttctgctgatcattatggcgtatgatcgttacgtggctatctgcactccactccactaccccaatgtgatgaacatgagagtctgtatacagcttgtctttgctctctggttggggggtactgttcactcactagggcagaccttcttgactattcgtctaccttactgtggccccaacattattgacagctacttctgtgatgtgcctcttgttatcaagctggcctgcacagatacatacctcacaggaatactgattgtgaccaatagtggaaccatctccctctcctgtttcttggccgtggtcacctcctatatggtcatcctggtttctcttcgaaaacactcagctgaagggcgccggaaagccctgtctacctgctcggcccacttcatggtggttgccctcttctttgggccatgtatcttcatctatactcggccagacaccagcttctccattgacaaggtggtgtctgtcttctacacagtggtcacccctttgctgaatcccttcatttacaccttgaggaatgaggaggtaaaaagtgccatgaagcagctcaggcagagacaagtttttttcacgaaatcatatacataatgggcactgggattgcagacataattgcagccacatccttaatgaaagagcaaaagtaaagagtcaaaatcaacttatataacttggtaaattaggtaaaatggcatagagcaggtcagatttctgctcattaaagataagaacttattctgttcattaaagataagaacttattaactattatttaaataaagcaaaagatcatagtggaagttataaggaaaaataacgtgggaaagtttaaagacagcttttgatttcatcagtaaaagaatacaatttggggaactcagttcagtctcagtttcaggagcaggtagagtgagaattgactctcttgatttatactgttctgtgggctattgcctctgggaagctatacatcactcctgtgatttatacattatagtagtttcaatcttgttttccaatatattttcaagtgtataaataagcctttacttatttatattgaattaaacttttgttgcttttgaatgtaattctctcatgtctagatctattttgtactttttttttgagacaggaattttttgtactattcctgcaacttcctgtaagtctgaaattattgtcaaaataaaaagttaaaacaaaacaaaactatacacccacaagaatagtaaaaattaaaaaggtagaaaataccaagtggttttttttttttttttcctaattactctgtcgcccaggctggagtgcagtggcgccatcttagctcactgcaacttccacctccaggtttaagtgattctcctgcctcagcctcctgaatagctgggactataggtgcatgccatcatgcctggctaatttttatatgtttagtagagatgaggttttaccacgttggccaggctggtctcaaaactcctgagttcaagccacctgcccctctcagctaatcattaactactatcactcattgggctgaagtatatcagtttattgtggaatgggcaagtccatatgaagagggatccatgacaaatttcttaggtaatgatgatgatattctgtgactgaaataagtaggattagctgtaaatgaagatcctatagatggtcagagagctaccatacaatatcaactttaatggagctgatggaatgaaatgaaatatggttaataataaaaatattaagtataaatatgtttctttgcttattctgaaaaaaatttataattgattggggtctttgtcactattttccacatggtctgtcaacttatagaaataatacttgagtattctggagaactggagagcagacaacatagccatccacacattacagacatacacaatacagagtgagtgacccactaactctaactaaagagtaatacatgattaccttttagtaatcaaaaggacaaagaatcagaagcagtctattcattaaactgagagatgctcatgaaaatatctaaatatcattacttcaagttgacaaacaagggtagaaaatggtcagtcccctataattctcatataaaacttgagtcatagtaagagttttagatatctatgatgaaatgaagtccagatatcactactatgtacatgttaaaaacttagaaaaatgatctaattatgcctctagtttctggacttttatgtgcataagtattcatactcattaatatcttttatgcagaaataaattcccactgtcttatttgtttatttgtattatggcactattcattattttaccgtatagaacatggttgtaacctgaagaattcaattgttgaatacaaagttgctgagcagatttctatattaataaataatgattcctctctcctgttaaagtaagtaaaccacagagccaagcatcaagatcttttatttttgttctttaagactctctatttatttagtgagtaattaaatacatttttatcttgtctctgagtctgaaaagcttttttctgtaaaacggagacaaaatgttttatttttacgtccccagagagttgaaaaattagtgtgactaaaaacgggtagtgtcagaaattttgcttgctgctatgaaaaaaataagcaaacatcacaacgttgttccgttatagttttaccagctacaatcttaatggctacgttgaagcattgtgttgttgacagacaatatgacaattttgcacgtgttcctctgtatggctgattcctgcacaagcagttccatttgggctcattggaaagatatttagatatttctccttattgtctgccattgcctataataaaagggcatttattttacataaattttataattcttgtgtcacttgaatatccttcctaacacatttcctagcaaataaaaattttcctcctaaaaatcatgatgtagaccttgtggctcacaggtttattgatcatacactcactgagtgcctaggaaatcccagctgcatttaagcatgccttttttagcgatgatgtgagaacaaactgatgatttccaatgtgtcatgctcttttgtaaacatgaatatgagatgccgttatctgggatatcctcttcatatcccagttgattcaccacattccattctgctacactatgtgccgccacagtgagatttaagatgttggtttatagacaatggtttatccaacttggtgttttctaccaagtttctaccaagttgttttctaagtatttatgactaagtacttaacagtcatccattgctctaagaacaatattggatgctgttgcttagttgagtgaattctctacataataactaaaataattttattaaaacataaattatttcatgccacacctgtgcttaaatcattctggtggcttcttattgtactggaaaagattctaaacttcttgagagaatatggaaagattctttttagctctctgatatcactctcttgccactctctgccttatagtctaagctgtaatcacactgatcatttacttccttgaacaagccaaggtctttcccagcatagatctttgcaccggccatttcccctgtctagaatgtccatcacctctcttatggctggctccttttaatcttaaatgtaacttcctcagagaggccatccttgaccactaaagcaagtctcttccatactctctaacagcaccctgctgttttatagcatttatcacaatctgtagttaaaatttatttgttcatatttttgttttctattttcactagaccctaaactccatgaaggaaggactacatgtatgtcttatttatggctataaacctagtatctggtacataataagtgctcagtaaatatttgtcaaatgaatgaatagtaagatatccccatttcattgctctgatggcagattttgcctggatacttgagagtgtcagtaacttcacctgttcaaagtcttctttctctgtcaccaaagtcatgtggaaactcactttatctgcttcactagtgtttgctaagctgtttacataagcatctgagtgaatgatgcaggcaagggctgcccagaaatctgaaggtttgtttagaccttggttatcactccaacagaaaagcagaaagaggcagcatatgttgtgaaaagagcttgagtttctgttgatccacttggattcacatgctgccttcattgttttctagctgagtgactttgggcatgttatttactctcctcgagctttagtttcttcatgtacaaacaagcatcataatatctacctttcaaagttgtgagaattaagtaaatgcacagtgcctagaataatttccagcacagagaagatattaataaccataacgattgctatgactgtcagatattggaccaaggatagttttataagtcacatagtctgataaatatggtatgtaacttattctttgcaaggcgcttctttaatttggagcaccacgtatcctaaggacgtagacattttcatttttcttcttttctctcttttctccccactaacttgtttaaggcactcttcatttcttcattcctaagggtatagataatggggttcagcaggggggtgactgcagtgaaaaacacagatactaccttgtcctctgggaggctggtggatgggcgggaatagatgaagatgcagtgtcccaggaacagtgtaactacagtgagatgggctgcacaggtggacagggccttccgcttgcccttggagatctgctgcctcagactcaccaggatgactgcgtaggacaccaccaggaccacaaaacagaccacggagatcaatccactgttggagacaatgaggatctcaatgacgtgggtgtcaatgcaggccagcttgatcacctgaggtacatcacagaagaagttgtcaatctcatcaggaccacagtagggcagcttgatggtaagggaggtgagggctatggagtggatggtccctcctgtccagagggccacagccagcagcacacataccttccagttcatcactatcatgtactgcaggggtttacagatggccacataccgatcataggccatgacggtgaggaggaagatctctgtgcaggcaaagaggtgcaggaagaacatctgggtcacacaggcatcaaaagagatgagcttttcctctgaccacacgtctctcagcatcttggggacagtgacagtggagtggcagacatcaataaaggacaggttgctgaggaagaaatacatgggagtatggagccggtggtcatagataatagttatgacaatgagaacattcccaatcagtgtcaggacataaaaaatgaggaacatggaaaacatagctatccgtgccttatgatttacagataaacctctaagccgaaaatatgtcactaaagaagtttgattgagtaggatggcctcttccattctctttgttagacaacctgtaaagaattagaaaaaaagtctaatataacacagtatctgcatcaatcatttggtcatttaatttcttgtgtgtttatgccttttctctccatctagaatttatggtaaaatatcttgcatttcttttaaaaatccccattaacatcttacatgatgatacacccatagtaggtacttaacatacacttttggaataataaaatagagaatcttcattcattaagagatataaaacaatcttgaagagggagagagagagggaaagaccaaacaagttatttctccattaatgtagtaggatatcaatgtttagatttaggttatggatttttacaggagaagaagttaagattctctttaactcaaatacataatttgttcaaggctacacaaatatggtccctgaacatagcttttttttttaatagtcctgcagactgcacttttcatcaacccaaaccacttgctcagctgttggctttgccatggggctctgagactgtaatttccatgacataactttcagagggcagaagctttgtaccaagctactggacaattggcaacgtggctgtgatgttcttgaacaattgtttagagaaggcaggataaaaccctggaagccttggaaaatgtggaagttgacctctcctccacccctcagctgagggcagacttattcttaaactgggagtcaagatccaagcctaataacattactgtcttgattagatcactctagctcttttcaaagtcccgttctgttgtcttactggcccacaagtgaaataaaaatagttattttcttttaaattagcctatgactcaagcaccactattttttaaaataacgagcatatgcattatagtcacaggattttagcccttaaagggacttgagagttgacataatctatttttttttcattttacaaatagagaaaatgaggcacagagagtcaaatcaactggtccaaggttacacggaactggagtcacagctgggtctagagctcaggtctcccgactcttggttcaggcttcgtccgctctaccaccactctcatctgaatttttgtggtagttggtagaatcagggagtgaagcagaatatgtcttagtggcctctctcttcctctccttggtgtcctgagtcagattgtggggcagggttagggggactatgaggaatctctcttttctagctttcctccttcatgctgctgccctgacacacacagccttccaggggtggcccacccaaggaagctgtctctcttggttgcttgggccccatgatccttgctacttccttcctatcacaagtgactactggagatttatatcatccctcaagatcaggctccctggcagactaatgagtcaaccccacactgcttgtgaaatgtggcaaagaagatatttttggggccagagaagtccttcagttaacacttaaaaattaaactcactgtgtccagtgtttggattaatatttacagcagcatctaaatgtagctattgattgattttactgtttagaaatttttcttcgagtattcgtttgaagcttttgctccaagaagtgattttaagtgttactgatttacacttgttttcatggtcgcaaaattcaaagccgaagagctgaccaagaatggggctaggattttattcagtatgggaaatttcacctgcacagactgaagagggtgtgcagaccaagaactaggtctgaaatgaaggcttctgttctcccctcatagaatatggatatacattttaaactaaactttttccataattatcatttttttctatttctgtggagccacaggaaaaaaatgctttgcaaaatggagatgtgttcaactgcagtagaaagaatatggtgcacaagaagaaaacctagtgttttttgcatacatttcaaggaaatggggaaagatgattaagaacagatataaaatccaactaaaatatctataaaagtcacctgggttgtttctgatgctcttagtacctccaaaagtaacagaagtgtcagtcctgcactttcaatatcaagacttttatcttccagtagaaataacaacttatttgaagttggactagtcagataaccccatttaccttgctttctccaataagaaaggtgagagcccttgaagttccctccttaggtcttgttcacagttttggtgatgtcacagtagatgtatttggcgatattttctggtaaaaggtactatttcaggctgtctgtaaaaatcacacctttgtagctatattattatcatatttttcaatatgtcaaaatatgtaattctgcaccaagattttctaggattggtttccagttaacagaaaatgtagtacagaaataatatatatgttttcacttttccagattgtagtggtgagtagaggagattaaaagccacagtcaagcccgggcaacatggcgaaaccccgtctctacaaaaaatacaaaaaattagctgggcatgttggcttatacctgtggttccagctgctcaggaggctgaggcaggaggatttcttgaacccaggaggtcaaggctgcagtgagccgtgattttaccactgcactccatcctgagcaacacaacgaccctgtccaaaaaaaaaaaaaaaaaaaaagagtcagccacttttgcaggcccttcaggtttattaggacacttctaacacaaaacttgatctaattattcagaaaaccagtgcggcagaagcatcctatttcctttgcagcacactgtttaggtgcaagttttgtattgccagtttcaggtggattattccaccttcaagtactgaaggggaatctgtagagaaagaagcgctggcagctgtagtgttggtgttgttctacctacattatataggctttatgtccttgggaacttttaagcaatgacatcagcttgccctactcactagttaagaaaagttaattctgtggggaatgaagttacagactttgcaataatcaccaagagaattaaatgagaaaagcagtacttaaatacctaaatctttaggatgtatttatatatggttagattaactactatttagtgattgcctactatgtgctaagtattaggtaataggctttcatgttttcttatttaactcatataaaaatacagagatgagagaagggtaatgaagttaagatttttttttttttttgagatggagtctcactctgtcacccaggctagagtacagtggcgcgatctctgctcactgcaggcgccgttccccaggtttacgccattctcctgcctcagcctcctgtgtagctgggactacgggtgcctgctaccttgcccggctaattttttttgtatttttagtagagacggggtttcaccgtgttagccaggatggtcttgatctcctgacctcgtgatccgcctgcctcggccttccaaagtgctggaattacaggcatgagctactgcgcccagccgaggttaagattttagtcagctttctgacagagagattaagtgctttgactctagagcagattgggtgcaaattccaatgtcctacacgtgctaattggagcaagttatttagcttctctggtccttagatttcccatccgtaagcttgaatagtaatagtaaaactttttagaactcttgaaatatttgtaaagcatgtagctcttagcatattaatataattatgttaaatgcaattcaaacaaacaaaaaaacagccgaccatcactaccagtcaacatttttggcttcattttttcattattttggataacagtgaaaatttagaacctcttgttccaattttctttttgctttctctctttagatagatgagcttggtggtttaaattggtgaaacaagactccaaaggagaggtatgaagattatactttcagtttgaatttcaagactgaatagttttgtgggatggttaggatatcttaaataaagggtatggagcataaaataaatcttatagccaactctccatgtgacagtgagtagaagagaagatggtaataagagtgaacatatcagaagttacagaaaatgctttctcctaaggccttgtggcttgggcttcttttccctagttttcttgtttgattcattatcactgatcaaagtccagacttggctgtaatgaagaaggtgtagcttccagaactttacagatattgccacttggtcactgtgggacttctattgtcattgtaatagccttggaaatcaggggacacattaagaacagggatatgctggccatactaattatctgttaaaacaaatgaaatatggcctgagaaggactctgtacttgagtccttgtggatgacctgtaacctagcttaataggcagacaagattgaaaacctaacttaggagtatgcacctgtaacagtagctgagttttggccaatcccagcagccatacttcaaccactcatagtctgctaagtgttcaaactgtgttcaaataaggcaaatgtcaacctggtgcaccaatccagctgtttctatacctcacttctgatttctgtacttcatttccccttttcttttgtctgtaaatcttcttccaccatgtggctgtgctggagtctctctgaatcttgctttgattctgggggctgcctgatttgcgaatgatactttgctcaattaaacttctttaaatttaatttggctgaagcttttcttttaacaaatggtgtcagaagtgggatctgaagtagaccttctaacaacctccaaaattgctgagtcaacaagcaagttacctgatgaacgtatttgtgtcctttgatgtctcagaatggctggggattgtggtaagttctctctcagatttcggagctccacagatttatgttttgagctctccaggtttctttgagcaaatttctgatccaaactgggtttgaaagtcatgacagaaactggacgggttgaggatcaaatttgatctggtaattaactagcttggatccagttagaagcctcttacctctgactgggtcagaaagaaactggtagtaagaggtaatattgcaggggttataaaattttgcttttaaaaattcacaaggatttttgtgttctactcctttgtttcatttttcttgcacacttaggtaggaaagatcattggctaagttaatcaatggaacctagagccacgccaatattttaggtaaaaatgggattctcagtttctgaaaaactgagttccttctagcttatacattatacatacattatacatacatatacattccttccaacttatacattaggcctgggaagcagcaaagtcttagagaaatggtgaaatcttactaaagataatttacagtggaatgttctgaataaacaacaacatagaagtgtatttaaaaataagggctcctccacgtggctcaggcctgtaatcccagcactttgggaggcccaggcgggcggatcacgaggtcaggagatcaagaccagggtgaaaccccgtctctactaaaaatacaaaaaattagccgggcgcagtggcgggcgcatgtagtcccagctactcgggaggctgaggcaggagaatcgcatgaacccgggaggcggagcttgccctcagccgagatcgcaccactgcactccagcccaggcgacagagtaagactctgtctcaaaaaaaaacaaaaaaaaaacaaaaaaagggctcctcaaaattaaatctgctaactgtttagtttagttactatcctgatccaaaggaaacagactgcagcaccaattggctgactttgggtaagtagtggggtacattttacctgagtaaaggatgggattgcattggaggccctcccctcagtaaagtccctcttggttaaaaatggattaaagatgacagggctcaaccaggggcaagtttgagccttgccagttcaatactgcatgctaagcagagtggctaatgtctatgttttgtcacatgtattttgctctgtccagaatgccaaatgttaatttcattaccctatgcaaccccttgggtggcatcctgcaacagtgagaaaattttgcctgtggttccatgattttttgtgtatgtggttggctccctggcactatagtatgtttcagggaaggggaacccaggaacctaacacgctggcaaaagtgtaagaatttcttaccagtcaggtttctggcctctctttccctgtgcttctctttccttgtgcaaactgggaaagttctggcctctctttccctgtgtaaactggttaaatgaatggtaaaaaatcactgtttatcttctgcaaagttttgattaatggaaaaaagtatttatgaggttagtcttaagctgtagcgaatctggtatgtttatgcatcttctgtatcattctttcataaagaggggtaccataggattgaacatgggctttaaaccccataagcccactgctcaagatggcccagcaagctggtcagtaacaaactttgctgcaggatcctgaaacaaacaaaaaaactggataaggtctccatattgttttatgtctttgggagcttgaccttgtgaccatatggtggtactttctcttgctctctgccttccagggaaaaggaattttagggttcatgtcatagttacctctaaaaattatcttgagtagttaaaagcctttgcaagctcaaaattaactactctagactccttctgggatgggcagtggagacttcccagtgctgtagctcagtagctaagattttgttctttcacagtggtggcttggattcaatcctggcttaggaaatgcatactttctggttgatatctgtgtgacctttatcatttgttaattctcttcctctccatgaacaacttctgacttcccttcttgaattttcctttctttgagctacctttgaagattctagattttgtaaaaactgcatgttttcctagccctgtttcttgaagggctctgccctaaggccagaattaagaaactggcaaataaaacatctaataactactggatcttcttctgtctgtgtatttatgtatgtgttgtgtgtatgatgtttatataaaagatctctaattaattggcataaaaataagctcttaaatcaaatattttgaaagaaagataaaaatcctaatgtcttttagctcatgtaactttagtaatctttgggaaataaaaacagctttaaagattattggtaaaataaagacatttggtctaaattaggcaggtcagatattaggtttattaaatgctttaaggtcatgaactgttttgacttttgaaaattgttcaatttacctaccttgaagacactagattctagataagccctggggacatgtggaattagcaatgccccttagccatgcaaagaaggttataaagaaaagatatttttatataagaaagaatactgtatgttaaattcttatcctaaagtaaaataatggttatttaaaaagagagatgtttaggacaagtcagaaagtccaagcacactgtagatgaaagtctgtgtaagtcatgaaaggattcgtgaaaggaaatctgtgcaccaaaagcaaaagttgctgagttaccattataagatgtgattgagattactgaaaaaaatagttttacgtgcagggtatgtgaggatagtaaaatgtgtttttggcaaaagattataagaaggcatgggaatgtaaatttttgcctagtttagagggttaaaggattgttttaaattatgttagaataagctaaaagcttgaacaaggtgtagaagggttgtaaaaattaatcttgtaaaagaaattctgtgtgtgaacatattgactaaatttaaaaggggattatttgttttttctgtaaattgaacatcaaaataaaagcacaaacaggggtttcttaaagcactcatctgctctttaacaaaaatttgtaaagggttataaaaggtttatcggaatctcaccttatggtcaaactgatgaagactggttagatttgtctatagacaaatagacaatagatagattataatctatccaaattatatataatttgttttattaagaattgggtttgacattaataatatactaatgcaagggtaaaatttggctttctctcttgaacaagattttcatgtaatattaaaggataatgaaagatttttctttgccttttgagtaaactactgaaaaaacggaaagacaacagaccaattggaaagctaagtctgtcctttatcaatgagtaaaggtttttgtcttttgaaaacttcgagtcatcattttggctaaatgaatgacttatggtaatctggaatactagttcataatattaagtgttttaaacctttaacatatttaataggcttctcaaaatcaaatttcagcttcaaaattgtcttttctgacctctaattttgagatgatacagagggctcttgaagcatctaaaagagagataaacaggattatttgacatgtttagttacatgggatcgtcaaaataaaaacaatgtttaatcttcttcaggttatattttcatgaataataataatatattccaaaattttatgcatttctaaaattctgatatgtctgagtatatgctatcaatcataattatggttattgttattatagatcacagaaataaccacatttccttgtctgttctgtctttacagctatttaaagtcacttccacaggtaattgcataatgctgatgcaatttctaaaaatttcacaagcacataaaatcctaaaatatgatgtcttttaggagattcatgaaaggatggaaaggaccctgaaaagtgctcttgaatataggtttctaataactttaaaatcacatcgtgggtaaaattccccaatttccccagaattggaccgggtaagaattcctgaaactttaataaaaagactgattggtttataaaactgcttaccccagtagaacaaaaattaattaaataccgagaaaatactttgccaggttttcatgctaactcagccaatattaaaattgttgagacatacaatttgaatgaactccatgctctaactgaaattacctatgacaacccgtcagttatcagtgttatgcacctaagtcagagaaacaactggtattcaagaggacataagtctagtgttaagcatggactcatggagaaccaggaaggctgccttgtccttcctgagtccttaaagcttttgttattaaaggttctgcatttcatgactcatcatggaaaagataaaattatccacattacatgcatactggtgtggtgacttatacattgctaaattagtttgtaaccagtatttggtttgttaaatccatattcttgggaagacaaccaaagcttcaggtacacttggctacccgatgggccatttaaacatttataaagggatttcattcaattgccattttcaacgcatgttttctgtttgtataaaagctttcccatgcaagagggctgatgttataacagtagattattacgctacagtgtattttcacctggtaaagaaaggtttttatgattccctgaggacaatcagcccctacacaatctagaacccaaagattggatcttctgagaacatcagagaaagactgtccttgacatccacactatagcaaaactttggaactttgaactttgggttcgtaatctcacaactgagaagggtccctccacactcttggaactgtacatccattggaacccttaaggtaaagctaaccagggaaatttctccccagaagaagatgccatccttgatataaacagcttttcccaagatcacagatcaagacttctactattatgagactcttatctttgaatactttttccttgtttatgcctctgtgaacaatagaaatggaaagggggtctgttgtgtgcacttatatggtatacttttattcataaatgattttgcagccagccttacacatgaataaccttatacctttacagataaaaaaatgaaagcccattgtagttgagaaactttaaaggtagaaatattgccatgtaatcagtcagaaacagaacatggattcactcctcttaacccacatcgtgggctaaagagaatgttgctaggaggtcttcactcttcccaaaggcatcatttgttaggtcatttttctgtggtttgaagtaaaagaggcaatgattagaaatgtatccctcatgataggcactatagcagattctactgcaaagactatgcttacacaacagactttaaagtctcttgtgacagttatgctaaacagtagaattggctaaacagagaagaatctgtgcagtgctagcacttgtggcctaggaagaaatacattgggtattatagagattcagttgtaggggattaacaaaaagatcacttagttaagcaagtggactctttatctagctcattctttgatctatttgattttaggtggtttggtttatggggaacctgggtaaggagcatactccaaactcttggtattatcctcccaatagttaccacagtagtctctctggtgcactatattctcttgaaggttttaaatgtttgcatgcagccatctctagaatgtcaaatggtctctcttcaactggaatgacaaaagctgaagtaaacatgtgaccatgaggacaccgtaaactatgaaggacatgctgataccagaaacccaaaatgatggtaactgagagtggcactaaggccttaagtttggttacgctctcacctaagtgagaacctggccaaaaagggggaattttttagaacaaaattatgggaggccattgtattggactaagatcatgcactagaccccaacagaccaaaccaaaccaaaacggagttgcttatgctaaatttgacgtaatgaaactaagactttaaggaaacacataaattctagaacagaccaggttttgtttttctcctgaaaacagaatatttcagcatagggaggtacccactcagtccttattctctccttggaaaactcattcttctactgtttcccagcgggtttgaagaccaaataagtacatttatgatggtgatcatgacattaatgactaaagttttggtcaatctctcaaaattgagaaaatgaccaaaagtggggaattgttaaagcaagctaaatatagcctgagaaagactacatacttctatatttgagttttgtggatgaactgtaacctagcttaattgaaaaccttgcttaggagtatgtgcctgtaacaatagctgagtcttggccaatcccagtggccatacttcaaccactcaaagactgcaaagtgttcaaactctgttcaaataaggcaaatgccaacctgtaaccaatctaactgtttctatacctcactcctgacttatgtacttcattttctttttttttttcatctataaatcttcttccaccacaaggctgcactggagtctgtctgaatctgctgtgattctgggggctgcccaatttgtgaatcactcatttctcaattaaactcctttggctgaaatttttcttttaacacctctgtacttttggaatagaagtactttatcataggcatgatatatcaagggcaatacagaaaatgatattcagttgatcgtaaggcaattactctcaccacttttttagtaaaatgcaagattgagaattaatctttgactgtcttatatcacagttccctgctttcccccaagcccttggtggcctttctccttggcccatgacttttttctgactatacacagatggcctctgaggtgtcccactaaggcttttcctccctgaaagtatgtccctcttattccaaaatgtattccacagaataaatgaaaacagtggtttacacttgcatagcactttagagtttacaaagctccttctcactcattattttatttgctttttataacactcctgtgaggtagggagcactatggaaaaattggattggtgttaagtgattttcacagagtttacatgccaggttagctcccgaaccagggcttaaactcagtcttctggtgccaagtccagtgtttactccattacttcacttggatgctgcatattataaaggagaaatagcttcaagatatgaatgattggttaacctcaccttctatggaagatgcacacttaaaagaattgcttgttaaatcatatagaaatttttcattggtgtaggagagagagcagttttttaattattaactgacattttccttcttcccattctactctttccattccaaaagatcagtgatatggtcttcactgctgaaaggtcactgactcactactaaaagtaatcaatcagcagccaataacctaggatgtgtacaatatcatacttactgtagtatgagataaaaaggctcataagagtaatgatcctttcctatgaggaatttataacacagtgaattaagatgacatttattttaggagttgaaggaaaccccttgaaaaaaactttggggtgatatctgtaaacgcaatatgaattaaatgtgttgtgaccttccgtctgagcccttccatcccccacagaagaaggtaagaaatcaacagagcttgcatgcccctggtgggaccatcattctgtttttcacaataaactgctgaaaccagaccttaagaggaagctacaattagatctcatcacctacccacctgctttcaaaagagaccaatcaggttaattccctcaagctatgtatgcctgtttattccagtgttcacaacatctttgaaccttcagatcacccttatggactcttatgtccataaagcttggtactttctgtagtctaacttttatccttttcagaccctgcacacactcttcattatgtactctggctagcattttgcaagcagaatcccttatgacctccactgttttttttttttttttgcacattacctttatattactgcagtcctgttaagcagtgcagggtttttctgctatgctgggtctcaagttttggtaagtgccatttttgttttttcaaaaccatgctgattcagataatttctctttcttcctttgtagaaatttctatgcttcgaagaaaattttaacagactgttccaactgcaaccctttcttgttttatcttcaatgatcctctcagccactcaccctccctcctcaaatattttgccaattataatcatctgcacagatgaccattcaatactttggcctcagttatttagcctcttctacagtaatttcaccctccaaccctaactcagccattcccatgaacatgctcctgaattttcagtatcaataacagcaacccatccatgctgtttcaagtattctactttctgatcaccaacttttaacctttcctgttcattccttctagtactcccaattatacattttttcaaacctgccagaaacaccaatccattgatcctatcatcctctcactatcctttattcctctcagattgttactccttccttatccaacttaaactccaaggtgtaagtttataataatacctttgcatacaccttctactcatttgttcatctgccccatccactggaggtttttccaggaattatgttcaatgcaatgcccatttttggggtatgcctgagctgatgaaggaaaacacacaacaagatagaaggtcttacaattgtgaccacaacctcaaataggcagttctgcattttctgtagtcaatttacatttttactctccgtggtaattgttttatacagagtttactcaaatctttagcaaatccttctaacttttagattcagctaaagaaccgcttactattttaataaaaaaagtaatcagaagagaagttttaccccatcccactgctaactacatccaccagtctgcatctgaaactgcaaactctgcctattcttataatgggcattctgctctatctaaggccaacccctccatttgtacccgggatcccagcctttcttgcctctcaaggactttgctcgagcaactgtgtctctagcatcatcacatttcggtcactgttgaagcattcccatcagcacacaaatatgctgtaataatttcaatattaaaaaaaattccttgacatcacatttttcttcaacgggccacctattttctctgcttttctttatagctgcattccttgacagaattacctatactaatagtttccacttcatctgctaccatttgtttattgaacctactctgatctgactttgtgtctcaatgactccgctagaatagttctcacctagatcaccagtgacatccatacttccaaattcaatgggcagttcttggtccttgtctcatttgacctttcagcatcatttaacatggtcaactttttttttgtttaaatttttattttttaaattaaattaaaaaaattttttttttttttaggctgggtgtggtggctcatgcctgtaatcccagcactttgggaggcagaggcaggtggatcacctgaggtcaggagttcgagaacagcctggccaacatggcaaaaccctgtatctactaaaaatacaaaaattagccaggcatagtggtgcatgcctgtagtcctagctacttgggaggctgaggcaggagaatcgcttgaacccgggaggcagaggttgcagtgagccgagctagtgccattgcactccagctggggtgacagagtgagactctgtctcaaaaaaaaagagaacagattttttttagagtcagggtcttgctctattgcctaagctggagtggtgtgctgcctttgcctctctagaaggtaggactatagttgtgcatgaccacgcccagctgattaattttttttttgtagagataagggtcgcactagggactactggagatagccaccatgcctggctctttctcttttttgaaagaggacacttcactctcctattccccctgccccaatttcctggttgctcccttaaactctcctttatagtaccctctttctcttcatgacctctaaatgaaatgcctcaaggatcagtcctcagatttttcttttctctgtttatgctttctaagtgaacccatccaagctaattattttaatgccatctttgtgctgatcgccggaatttttatctatagccctaacttctctgagccatagttttgtatattcttttgtggcctacttaacgtctctacttggatttctaaagagtatccaaagtttaaaagcaatctaaaacaaaactcttctttgcatgctatctgaaagtgataactccattgtcctccccatttttgtaacagcattaccattcatccaactactaaacaagacattctgaattcatctttatcttctctctggtatcccacagtcagccattcatcagcaaatacaaatagctctgcacttaaagtatattctgaacctcaccacttctcagccataatcaaaggcaccattatcgcactttgactactgcaacagcttcttatctatttctctatttcaactcttgccttcctcttagatcctgctctccaatcagcaatctgattcattcttcagaatgaatcatgtgtctgtttgtactcaaaagtaatcacttccctctatcctttcttgttcattaaactctaaccacactgaattccttgtgtttcttgagcacactaaacatcctctcctcgcatgacctttgaactaactattccctttgtctagaatagtttttcaccttatagtacctggttctctgcttcattttcttcaggtctttggtgcaatgtcaccacttgagagaggacttctttgagagaggttgccaaaaagaacactccaaatctaattctgctgtcaatgacctccaaccaatcacaattagaagcaaacctgtagtcaaactaagttgggtttgttgactccttgtaatgagggagaccatggaagttccagtaagtaagaggattttagaaagaacatatagggtttgggtttttgttaggtgataatgggaaaggttcaaggaagcaggcttttctttcaaatgactattgttaggaagtaagagtaattctatagttggatatcttgataattctcctctagaaggcagtaagaatgcagaaaatgaaaattttaatgggttaaaaaagcaacgatcactcatataaccgggatagggaactatttggttatttttatggtttggacatggtcttctttttgtctgtgttaagacatgaatatggaatagtcttatttttgaaaatggaatagtcttgctccattatggtactgagtagtcttgtcagatattggtgttcagagaagctgtttagtaggagatcatcaagtcctaactatgagtgctggactagctcctagccacaccaaggcctatgtgatagtgccaggccattttctagttatcaggggtagcttttctccttcatagtcctctcttttggctgaaagcagactaggacaggccacaggacattaatctataatatccatacagtgttttcatcattgtcaaaactatgtcggttaggaggttgtctagagaatgttgtctgtagtgggactaggattggtctctctgttctttttgctgcaaaacaaattgttgaatccctttgacatgacaataaatttgaggtagcatttaagaatatggaaagtgtacattagctatattaactgcagtgcaggcaattaccagtaacacaatggttattagttcttctttttttttttttattatgctttaagttctgggatacatgtgcagaacgtgcaggtttgttacataggtgtacacgtgccatggtgatttgctgcacccatcaacccgtcatctacattaggtatttcccctaatgctatcccttccctaaaccgccaacccctgagaggccccagtgtgtgatgttccccccgctgtgtccatgtgttttcattgttcacctcccacttatgagtgagaacatgcagtgtttggtttctgttcctgtgttagtttgctgagaatgatggtttccagcttcatccatgtccctgcaaagcacattaactcgtccttttttatggctgcatagtattccatggtgtatatgtaccacattttccttatccagtttatcactgatgggcatttgggttggttccaagtctttgctattgaccagtgctgcaataaacatatgtgtgcatgtgtctttatagtagaatgatttataatcctttgggtatatacccagtaatgggattgctgggtcaaatggtatttctggtgctagatccttgatgaattgccacactgtcttccacaatggttgaactaatttacgctcccaccaacagtgtaaaagcatttctgtttctccacatcctctccagcatctgttgtttcctgactttttaatggttgtcattctaactggcgtgagatggtatctcattttagttttgatttgcattaccctaatgaccagtgatgatgaggtttttttcatatgtttcttggctacataaatgtcttcttttgagaagtgtctgttcatattctttgcctgctttttgatgggattgtttttttttcttgtaaatttgttgaagttctttgtagatttattagccctttgtcagacggatagattgcaaaaattttctcccattctgtaggttgcctgttcactctgatgatagtttctttagtggcgcagaagctctttagtttaattaaatcctatttgtcaattttgccttttgttgccattgcttttggtgttttagtcatgaagtctttgtccatgcctatgtcttgaatggtattgcccaggttttcttctagggtttttatgtttttaggtcttacgtttaagtctttaatccatcttgagttaatttttgtataagatgtaaggaaggggtccagttttacttttccgtatatagctagccagttttcccaacatcatttattaaacagggagtcctttctccattgcttgttttttgtcagatttgttaaagatcagatggttgtagatgtgtggtgttatttctgaggcctctgttctgttccattggtctatatatctgttttggtgccagtaccatgctgttttggttactgtagccttgtagtataatttgaaatcaggtagcatgatgcctccagctttgttctttttgcttaggattgtcttggctatagaggttctttttttggttccatatgaaatttaaagtagttttttctaattctgtgaagaaagtcagtgatagcttgatgaggatagcattgaatctataaattactttgggcagtatggccattttcactatattgattcttcctatccatgaacatgaaatgtttttccatttgtttgtgtcctctcttatttccttgagcagtggtttgtagttctccttgaagaggtccttcacgtcccttgtaagttgtgttcttaggtatttcattctctttgtagcagttgtgaataggagttcactcatgatttggctattattagtgtataggaatgcttgtgatttttgcaccttgattttgtatcctgagactttgctgaagttgcttctcagcttaaggagattttgggctgagacgatggggttttctaaatataaaatcatgtcatctgcaaacagagacaatttgacttcctctcttcctatttgaataccctttatttctttctcttgcctgatttccctggccagaacttccaatactatgttgaacaggagtggtgagagagggcatccctgtcttgtgccggttttcaaagggaatgtttccagtttttgcctattcagtatgatattggctgtgggtttgtcataaagagctcttattattttgaggtacgttccatcaatacctagcgagatcaacgcagaaggcgagtgatttctgcatttccagctgaggtacccagctcatctccttgggactggttagacagtgggggcagcccacagagggcaagctgaagcagggtggggtgtgtcacccgggaagcgtaaggggtcggggaactccctcccctagccaagggaagccgtgagggaccgtgcagttaggaacggtgcccagatactaggctttttccaaaaccagcaggatgaagatagggaagattatcttgatgcatcttttagttaggtaataaaggaggttagattagtggcagatcaaaatgaaagaaagagggctgagaaatcagaaaattaatcttgttttgtggtcttgggtgaaagctatccacttctgtagtcatcagcttgtagagaatttttaagaatccttaactcggggtcttccaagtgcatggatttccaggctttgtaagaaatagatgtatctttttagttagaaagcctaactcccattactgggtatatacacacccaaagaaaaataaatcattttaccaaaggacacctgcacttgcgtgtttatcgcagcatattcaaaatagcaaagacatggaatcaacctaggtgtccaacaattgtgtgctggatagagaaaatgtggtacatagatacaatggaatactacatagccataaaatagcataaaattatatcctttgcagcaacgaaggatgaagatggaggccattattttaagcgaattaacacagaaacaaaaaaccaaatactgcatgttctcacttataagtgggagttaaaccttgagtactcacagaagatgagaacaacaaatactggggaatccaaaagtcaggagggaggaaagggggaaagggctgaaaaaaaaacttcctgttggatactatgttcactatctgaatgatgacatcaatagaagcccaaaccccagcatcgtggaatatgcccttgtaataaagctgcacatgcacccctgaatctaaaataaaagtaaaaaataaaaaagcgtgactccaacgaccaacaccttgaagttttactgttgtgtcagttgttaataatccctgccaaggttcttttcactggggctgaagggctgtttctctctgacgtattttctagaagactagatctccctatttcagatcagacagtgggtgttttaaaaatgtagtttgaacctgtttgtgttaaagctggcagcatcatatgtgtctcatgtgatatttggtcacattaacctgtagtatggcataatctaggtttagaagtaaaattttcaaatgaactgggtagcttattattagctcatacggagatcacctgtgggtcccagagaaggtagatctcattgtcatgaaggctaatagaagtctgagtacttttgagaactatgccaattttagttttagaatttcattagttctttttacttttcttgatgtttgtagacggtaaagatagtgaagtcttaagtaaaagatacaggtttacagagttatttggtaatagtataagtgaattatatgcccctattactagaaagataagttaaaatttcccatattggagaaaaagaaattaaacattctggtcacaactgggccatagctctttgtcaaggacaagcatcaactcatcacaagagtaaataataaccagaacatatttatagtccattgctggggcatttatataaaatccattcagaggtgatcaaagtggccttgagcctttggttcctatcaatatcctacttttgcaatcctcccagaataatctcatcagaaagtagggcatgcatagaaaatgtctttggcaatattcctaaaattgttccaccatgttggttaaatattattgtcaatgcatctttattattttggataatattgtgaagcatttttgttaaatgcacttttattatggctatatccttaggtaatatcaaattgtctaaaagtttattaattctcctttcattttatagggattcctaaagagatgaggaaatttgcttgttttcaaagcattttaaaataatagactaactcaaaattatatctactatcaatataaatgtttgtttctttactgtttttcctctggcaggtccaggcaagggcaatgaatttaactctccaagctgatttagtttctgggagaagcttaattttcaagagtaaattcaagctcttgaattaaagctcttgagatagcataaccttctttgcaattttcagtttttaaaaaataataaactattatgtaatattgaatcaagaatatttaagggagtctctaggtctgtgcaaggtatgagctgttgtctaatttaagtaagcagtcatgggcttttcctttgggtcatgtaaggaaggtgactggggttagagcgttaaagtaatagacagtgatgtgtaagtgttaaagtaatggacagtgacgtgtaagggcaaagaaacaataattcataagaagtttggctaatagctaagaagcttgagggatttttgtcatttgcagggtctgtaaagtgtaaggaatcattaaggtcggtgtaaatcctagaactaaattaactgaagactctcattgctgatataggttttaggcaaggtgatgtatcttgactattgtaccataaaaaagactgaaattagcaataaacttctgaggattcctctatatttgagtcagtattcctagtgcttgtccagccctctcataaacaaaaggaaaaaggggtttgtggatttagaaaactggaagcaaggttgtttttttttttgttttcagatagttgtatcactctttgggcctaaataaaaatattctgcctttaactggaaaagaagagttttagatggagaagaaccaattagctgcctcctataaggagtctcttatgtgaaacaggaataagactataataatctccaataagaaaagataatgggactagaagctaaagttttaaaacaatataatttttttttttttttttactagttagaggtattcaaggatggaacaatttcttcattagaaatgaggaagaatagggtcgggcatggtggctcacgcctgtaatcctagcactttgggaagccgaggtgagcggatcacctgaggtcaggagttcgagaccagcctgaccaacatggagaaaccccatccctactaaaaatacaaaattagccgggcatggtggcgcatgcctgtaatcctaactagtcgggaggctgaggcaggagaatcgcttgaacctgggaggcggaggttgcagtgagccgatatcgtgccattgcactccggcctggacaacaagaggcagattctgtctcaaaaaaaaaaaaaaaaaagaaataaggaagactagtaaaaatttcaatcaaagcctggactatcatttgtttgaaataagaattcaaatattatttggatggctagaataaattattcaggctatttagaccaaaccattatatgagtgcacaaaaggctccagttgtaaggaacaggtgaatattctgaaaagaagggcaattcctgtgcttcaaaagccaatcatgtatatttatggttttgttttgttataaactcaagagaaagagatgaacaaaagtggttggtggctttccaatagggttaagaggaaaagagggaactaatatttatcgcatgtttacaatgtgccagtaaaataaaagggagatgctggaatttttttttttaaattcccaatttctatacagcagtatatagtttatcaatagcaaagaaagacaatttgaaaaagtaatggttattgttaaacctgctttattttccaccaagtcttggcaggatgagattcaggattagaacagaaggtttaccttgttcataagatacatctaaatgaaggtgtgggaggggagggctagaactgcatgttaagaagtatgtaagtgtatggaaacccataaagttaagagttgaagtgtatgggagtgaatttggatgagatttctttagagcaaaataaacattttttcttaataaatactacaggttgcttaatcagaatgacaaaacaggtaaagaggcaaggtggtcatgatggtgtggtattaatttcataaagctatctgttgctttggaggcatgggccccagtcttagcatacctgagcttgagttctagtatttgcattttatccttttcattactgacaaaatgagaattaatcaaacttattttaattattcaaagtaatgaaatgtatgtgaaaagcctttgtaaggtgtaagacactatgaagtgtttgttttggtaacaatgaagttatccagtaagagtcttattctgctagtcatggatatgcatgggcaacaatgtctgcctccccagattccagtcactcctctctattgtgttgcatcatgaagcttgagaggaatggattgattgattggtcccattccctaacccatatctcaataaagtcattggactgtaacccatatctcaatagagtcattgagatatattgcattaagccatgcctgaagccctattttctctctgggcattctagttttatgagccaataaatccccttcagcttgagttgaaatttttgtttcttgcaattgaaacaatcttgattgatgaaacatttaataaattttgactcactgacagttttatggaaaagaatgtaatggagaccaggaagaatactgttactctggatttaattctgattgataggaaagaacttgttaatgacatgtatggtaggttaaatgaaagtagctttggagtcaaatatatttgggtctaagccctcattccagcatttgttatcagtgttactttaagcaaataacttaatgcctttcagctttagtttcctcatctataagttgggtgtaataataatgtctatatcatcggagtggtaattaggattaatagataattaatagataacgcacataaaatatgccatagcacatattaaggattcaacagggattaggtttgaaaaactagaaatggaagatgcagaataaagacttaactgcccattattgccctatctctaaaataaactgaagacaataaggaaaatgaatgagaaagggagaaacatcatctttttaaattaaaaggcaacactttaagtgtgaaaatacactaattagaagagctaatgagtgtatctgaaattagatcagggtaaaggaagatgccaggagaggatgactacattatagagtttggacagagtcagcacagcatagatttctccataggggccaatgggtagctgtactttggaacataatcatgaaaggctgtaagtctctgtaacctccttgctgttacagtgtaacagaagaggcaaggttgaatgaggaaaccttaaacatactatctttggaacaacgctaattatgaagaagaatctgtgtatgacaagcaactctacagctatttacctttgttaaccaatgaagagagaaggtcaaatcaccttgcaatctcacagacacaaaatatgtactatgtagggcttcactgtgagctagagggtatccttattggcctagaacattcttctgaagccttatgcacactatcttcctaaaaataacttaaccaagaagaaatcacttaatttaaagagaaatattatttaaaaagcaacagaggatttatataaaacactacaatctgaaaatgaaataagaaaacaattttatttacaatagaatacaaaatacttaggagtatatttaatcaaggaggtataaaatttgtacaccacaaactataaaacattgctgaaagaaattaaagaaggccttaataactgtaaagacattctgtgttcatgcattggaagacttaatattgttaaaatagcaaactactccaaatggttgacagactcaatgcaatttctaccaaaatcctaataccctgttttttttttttgtttgtttgttttgcagaaactgaaaagctgattttaaaattcacatggaattgcaagggatccagaatggccaaaataatcttgaaaaagaaaaataaggtgggaagactcacatttttatatttcaaaacttactacaagctgtggtaacaaaggcattatgctaatggcataaggatagacatacagatcaataaaatagactgagagcccagaaataaacccaataatgataagcccaagaaacaagctcaatagaatagattgagagtccagttaattttcaacaaaggtgccaagacatttcaatggaggacagaatgatctacttgacaaatggtgctggggcaactggatatccatatgcaaaagaatgaagttagacctctatctcataccatatgaaaaaattaactcaaagtggatcaaatatctaaattagaaactaaactataaaactcttagaagaaaacacaagagtaaatctttatgaccttggacttggcactagattcctagaaatggcacccaaaacacaagcaatacaaggtaaagtagatacattggacttcttcaaaattaataacatttgtttgtaaaaggacatatcaagaaagtaagaagcaaatctaaaggatgggagaaaatatttatgaataatttatctgataagggtctagtatctagaataaagcactcttacagcccaaccccaaatagacaaacaacctgattaaaaattggcaaaagacttgaatagacatttttacaaagaagatgtacaaatggctgacaaacatataaaaatatactcaacatttttagtcatcaggaaattacaaattataccacttcacactcaactaggatggctgtaatttagaaaaaattaaaataagtgctggtgagaatgtggagaaattggaaacctcatcaattgctggtgggaatgtaaaatggtgcggccattgtagaaaacagtttggctattcctcaaaagttaaatatagaattataatatgatctaaaaattccaatcctagatatataacctaaagaattgaagaaaggtattctaataaattattatatatgaatgtttatagtagcattattcacaacagccaaaagatggaaacaagccaaatgtccatcagtgaatgaataaacaaaatgtgatatagctacaaattgttattattcagccataaaaacaaatgaagttctgattgaccttcaaaagctttatgctgccctctccctctccctctcccctttgcacggtctccctctgatgccgagcggaggctggactgtactgccgccatctcggctcactgcaacctccctgcctgattctcctgccttagcctgcccagtgcctgggattgcaggtgcacgccaccacgcctgactggtttttgtattttttcgtggagacggggttttgcagtgttggccgggctggtctccagctcctgaccgcgagtgatctgccagcctcggcctcccgaggtgccgggattgcagacggagtctcgctcactcagtgctcaatgttgcccaggctggagtgcagtggcgtgatcttggctcgctacaatctccacctcccagccgcctgccttggcctcccaaagtgccgagattgcagcctctgccccgccgccaccccgtctaggaagtgaggagcgtctctgcccggccgcccatcgtctgggatgtgaggagcccctctgcccggccgcccagtctgggatgtgaggagcgcctctgccgtgcagcgaccccgtctgggaactgaggagtgtctctgccctgccgccaccccgtctgggaggtgaggagcatctctgaccggccgccccgtctgggaagtgaggagcgtctccgcctggcagctgccccgtcagggaggtggggggcagcccccgcccagccgccgccccgtctgggagttgcgggggcgcctctgcccggcgccccgtctgggaagtgaggagcccctctgcccggccgccaccccgtctgggaggtgtacccaacagctcatcgagaacgggccatgatgacgatggcggttttgtcgaatagaaaggggggaagtgtggggaaaagaaagagagattggattgttcctgtgtctgtgtggaaagaagtagacataggagactccattttgttctgtactaagaaaaattcttctgccttgggatgctgttaatctataaccttgcccccaaccccgtgctctctgaaacaggtgctgtgtccactcagggttaaatggattaagggcggtgcaagatgtgctttgttaaacagatgcttgaaggcagcatgctggttaagagtcatcaccactccctaatctcaagtacccaggggcacaaacactgcggaaggcggcagggccctctgcctaggaaaaccagagacctttgttcacatgtttatctgctgaccttccctccactattgtcctatgaccctgccaaatccccctctccgagaaacacccaagaatgatcaataaatactaaaaaaaaaaaaaaaaaaaaaaaagaagaaatagaatagaataatataagtaagttacatgtgttcctctaatttgtgttcatccaggggaggcaaaggatggcaacaggccaaatccagcctgccacatggttttataaatacagttttattgaacacagcctcgcccattcatttacttatggtctatggctgcttttttgcttcacaatggcagtgttgagtaactgcagcagagaccacacggactgcaaaacctaaaatatttactatttgaccttttactgaaaaaagtttgctgacccctgatctattcatcataaacttctttttgataaatggattctaacagagacaaagaacttagggcttaccatcaaaacctttgaagttctgcctggttctgtatgtggaggctctcatggtgttatcattgcactcttttaccaatcccactgcttctgtccccagtaacattctaatcttggaggcaccaacaagatataagttctgattttctagtgtttcttgttcatatttatttaacaatggtctaaacaacaactgggcaccttcaaaaacaaaagataagcacaatcttagacaaacattaaagtttcaaaaataaaaactttctaaataaataaaaaaaaaagctttatgctaagttaaagaaaccagacataaaataccacctgttgtatgattctttttatattgaacatccagaataggtaaatttgtagtcagaaagtagactagtgtttacgaggggatgaggagaagtggagaacgactgtttaataggtatagaattttctcacagttagtgttgttgcaaagatagtatgtttaaccttacctggagctgagacaaatttaaagagccgagcgaaatacaggggtggaagaagcagtgggaagagccctgtgggtaatctcagtccccagggaagccatttgtgacttttttccacagaggtccttggggagggctgccagaggaactgggaaaagaccacagggaggaggaaacatccagctgaactttgtaacagttttgactgaactcaaagtttcctagacagaactcaggggagggagaaattgagagcacagacacagcacagaagcctaagcaggtgggaaggtatgaaacctgaaagccccgcttgctttctcagccaggaggctggtagcctggggcaagttctcagctctgctcaccctctgcctggaaataaacttggtcctgctagcggggcaccaaaagcagttggtgctgttggtgggggcaccaaaaggctgggagttagaccagccttttgggctttgtgggagctgggttaggccagtaactgctggctttcccccacttccctggtgacctgtatgacccagtagaggcagccataatccccctgggaacacaacttcattgccctcagaaccacactcccatctcccacagcagccttagcaagcctcgcgcaaggacagtctgagttcagacttgcctaaccctgcccccacctgatggtctttctctacatgccctggtagctgtagacaaaggacatattctctcaggagctctaggaccctgctcattgcctgaccctcacagagtccatttcacccccctactgctacctccaccggagcaggtgctgctatccatggctgagactccagacaatggttcacatcacaagactctgtgcagacactcccctgcccctgccccaagtaccagcccagagcccagtggcactactgggtggttagacccagaagagaaataatgatcactacagtttggttcccaggaagtgacatccccatgggaagggagatagcacacatcaagggagcataccatgggacaaataaatctgaatatcagcccttgagctccagattttctctctgacatagtctacccaaatgagaaggaaccagaaaaacaattctggtaatacgacaaaaacaaggttaacacccccaaaagatcacactggatcactagcaatggatccaaaccaagatgaaatccctgaattgccagaaaaataattcagaaggttgattattaagctaatcaaggaggcgccagagaaaggtgaggtccaacttagtgaaatgaaaaaaagatataagatatgaaagagaaaatattcagtgaaatagataacataaataaagaacaatcacaacttctggaaacgaaaaggcacacttagagaaatgcaaaatgcactggaaagtctcagcaatggagttgaacaggcagaggaaaaagctttggaactcaaagacaaggctttcaaattaacacaatccaacaaagacaaagaaaaaagaataaaaaaaatttaacaaagcctccaagaagtctgggattatattacatgaccaaacctaagaataattggtgttcgtgaggaagaagagaaatcaaaagtttggaaaacatatttgagtgaataatcaagaaaaacttctacagccttcctagagatctagacatccaaatacaagaagctcaaagaacacctgctaaatttattgcaaaaaagattatctccaggcacataggcatcacattatgtaaagttaagatgaaggaaagaatcttaagagttgtgaggcaaaagcaccaggtaacctataaaggaaaacctatcagattaataatagatttctcgcagaaaccctacaagctagaagagattggggccctatcttcagggtccttaaacaaaacaattatcagcaaaggatttttgtatccagtgaaactaactttcataaataaaggaaagatacagtctttttcagacaaataaatgctgaaagagtttaccactaccaagccagcactacaagaactgctaaaaggacctctaaatcttgaaacgaatccttgaaatacaccaaaatagaacctctttaaagcataaatcttacaggacctataaaacaaaaacacaataaaaaaccaaggtattcatgcaacaaatggcatgatgagtagaatagtaccttatatctcaatactaacattgaatgtaaatggcctaagtgttccgcttaaaagatgcagaatggcagaatggataaaaattcaccagccaagtatctactgtcttcaagacactcacgtgacacaaaaagactcacataagcttaaggtaaaggggtggaaaaagatattccatgcaaatgatgctaaagcaggagtagctattcttatatcaaataaaaaactttaaagcaacagcagttaaaaaagacaaagagggacattatataaagatgaaagaattgtccaataggaaaatatcacaatcctaaatatatatgcacctaacactggagctcccaaatttatgaaacagttactactagacctaaaagatgagacagacaacaacacagtaacagcaggggacttcaatccttcactgacagcactagacaggttatcaagacagaaaatcaacaaagaaaaatgcatttaagctatgtcctagaataaatgggcttaacaggtatttacagaatattctacccaacaactgcagaatatacattctatttatcagtacatggagcattgtccaggagaggccatatgataggcctcaaaaacaagtctcaataaatttaagaaaactgaaattatatgaagtattttttatgtaataattacataattttatgtaattttatgtcttgggtttccacacttactatcttatggaacctgttcccttgaaggtcaccagtgacctcataatggttattttagaaagcctttccccccccataatggcctttttagggtatagctatcatgcaataaattgaatatatttaaagtacacagtttgataaattgtgacatatgtatacacccatgacgccatcaccacaatcaaattgattaacataaccatcaatcacaaaagtttttttgtgccctctcatgatcctgtttttctctttttgcccccgtcttcctttcccaagcaaacatgaatgcactttctgtcactgtagattagtttaaaatttccagaatttctagaattttatgtaaatgaacaatatatacttcttttggtctattttttatttttttttactcagcataatcattttgagattcttttatgtcatgtcttttaccaatggttcactcacctttattcctgagtagcattccattgcatggctatatcacagtttgtttttccaatgtataagcacatggttgtcaaaacaaagtaaagcatagggaactaacttaaaggtgcatggaacaacaacaatagcacagaaataaatgctgctatgcctaagaatctaatatgtgataaaaaggagagtataaatcaataaagtaggcaaatttaaaccaagtattttgaagttattaaatggataaatgaggcaaaaaatctaaataggcccctcacttcactcaatatagcaggggtaattaagaagaacaatgacattattaagattatatagtttacatttattaaatcagttgtgacatgatctccttttagaaagattatttagtcgtggtgcgaaggataaactagaaatagtaatcactgaattatggatgccaaagtaaggaggttatggtagcattaggatcatgagttaataaaaacaaggcaatgagaatggagaggaaagggaaactatcagagatttcaaaatttcagaggaagaaatgatagggggaatcatatttttctaactgcaatttaatagaagcaatcccttaacttttttccaggcttgtcttcaggtgatagagacttgtaatttctcttggaaaaacattttactaggtgactaggattcaagctgtaaatcttggttaatcacaaactttatgagtttagattagttgtgtaaccttctggactgtttgctttctctcctgtaaaggtcaactctaagacttcttacaacttcagatttcttggataataatttattatcttgaactgcatctccaattgggcctaagacaacagaccaattcagtgggaaatgaaaataataaatgaattgtatgggctaactaccactcacagggccttagtgaagaaggtgactataatctagattaaaagtctttccacacggtgttttctcttaatgatgaaggaagctgtgcaggcaggaatagggttacagggtactaattcgcttctgctctgctgggttgaatggcactcaagaggttgagtgtttgtaatgaaacacacacaagttctggaggcaagaagactagagttttgttacttttgacaagttacaggtcaatagagactgcctcttaagaagacctagaggaaaatgcaactttttaattaatctcctgtgtttctctggctcatgccattatcatagataagaccaagggatgcctctggtgattcattagaactcttaggctcactgattactctttggtctctaaatgcttctctgtggtaagaagagtagttaacaaaggaagctgggtttccccagaggaccttattaaaactgttgtggttttgaagtgattaacatgtaaatgaattaatgtggtcaatgaaccaagctatgcacacagagcatatctaggaggcagagaatcatacagtctagtcatactcaggaggaaactgtttagcattcagaggtgaattctggaagaaagatgaaaaaggaactcagaattactgctttaatttcagaaacactaaacatgaaatgacagaagattagaagatttttgtagagtttgtacatgttgctttagaatagattcctggagcaaaagtagaaatggcttaccattagagcaagcaggttagctcaagaggctatactaagctacttttgcacacctggtggcaccacatcctatttgcagtctgcaaacatcatcacctcccttaaatgtgacacttgttatatctcagaggcaagttaatcttactcaactgtatagaatagattagagggtggagagagctagctgatttaaactctaggtgaatgttagaaacaaatactgaaattgaaagtcagaaagagaggcaggttttgtgtgaaaagcagttagattttgacttgtgtaataataagatctcttgagtaaataaaacaaaatttctcttaggagttcatcagtttcctttgcagtcctaactcactagggatgtcagagttagggtcattatagcattctttgtgagttacagttagttgtagcctgtttgcatttactgatttttatgagataaagttgctttactaccatttgcctacaaattgtaatggaaattaaaatctatgggtctgtgatgtgaatagttctcctggggttggacagtgcacacctgcatgactataggcaaaaccatgtcagatgagatgtttatttaaaaataaatggctcacctacttccctaaaatttttctttgaaatgactaccaaagatacaggtaggactgattgagaaaaggcagaaattgaaggtctgaaaagagagaaaagtcaagaaagaagaataaaaagatgtagtctgggaagtattaggcaaattaggcttgagcaatattatgaaagttttcagcattgttcccttataattgcaaaatgggaagtattgtcacctctttcattttttggaagagtttgtgaaggattggggctaattctttaaacatttgatgcaattcactagtgaagcttcctgggcctggatttaactttgtggaatactttttgtttacttaattgatcttgttatagatctgttcggattttctatttcttcttgagtcagttctggtagtttacgtctttctaggcatttgtctttctcatctaggttatccaatttgttggcatatgccattgttgttcatagcattcccttataatcatttttatttctgtaaaatttgtaatgtttctattcctgattttagtcatttcagtgttttctctttttttttttcttggtcaatttagcataacaaaaagtttgtcaattttcttgatcttttcaaagaagacatttttggtttaatttgtttttctctattgcttttataatctctatttcatttatttccactctagtctttattatttccttccttcttcttgctttaggtttagtttgttcctttatttctagtttaaggtaaacagatgattaatttaatattttttctttttataatttggtgtttataaatttccctttaagcactgctttagctgcatatcataagttttgttatggattttttgggtgtgtttttgtttcctttaatctcaaattattttcatatttcccttatgatttcttctttgattcattgtttatttaggagtgtgttgtttaattttcacatatttgtgaatttcccaaatttcctttttaacttttagtttaatttcattatggtagaagaaaattatatagttttaatccttttaaatttattattttttccttttggttcttttgttctaatttctatctcttcattgatattctatagttagtgagccataattcttatagtctcttagttccttatttgtgattttttaaagttctttgaacatgtttgaaatagctgatttaaagtctttgcctcataatttcaatatctagcttcctcaaactttccttttctttgtttgacttttctgtagaccatatcttcttgtttctttgcatgttttgtctttttttttcatggaaaacttgttatggacattttattttacttttgccttgaaacattttatttatttatctttaaaattttatcattttttgggagatatttaacattttaaataatatggcaactctggaaatgtcactcaccccctcggggtttgttgctgctgcttgttattgtgtttgctatcagtttgtttactgactttcctgaatgcatttgtaaaacctgtattctttgtcatgtgtggccattaaaatctctgcttgtttagcttaatggtcagctaatgattggatagagatttccttaaatgtctggaatcagtaggtctcttatccttcactgatgggctttgtgcatgtgtttcaccagaccttcaatatttagcctggcagtttgcaactctgccttagccttcacttcttgctctcacagagcttcaaggtcagtcttaggtgagatattaggtacttcttagatctttcctaggtcttcaagtggcctttggcgtgtatacagccttctgtgtgcttctgcatggctttctagagtttcaggaatatgttggagtttttcagagccccctattgacatttcgttattcagcttttcctttaagtgtattggtcagtttcttgtttgttccaccattatcatctcctcaggcagtggcaatgttaaataattggtgcttattgttttccacctcctcccctccaaaaaggttgtttgcaatgagcaagttctgaataagatcaaatacaggcaagtcttgccaatggaggttgcaggaatatgccagacaggtcaaataatgacagtgctctgagaatagtgtttttggggagctccaaaccagctttgccctgtctagtagcttcaaggctgctgtttctcaccattatggcagtgctgttggttttcaaggctattggagagctggggagaagaagacgagaacaggacaaattaaaacaccacaaagttgctgctcactgttcttatctagatacagccagttttcatgagtaaatgcttcttgaattattgcaagtcttttgttaatttccagagttcagaaaaaaaatatttatttatttattcattgtttttgagatagagtctcactctgtcacccaggctggagtgcagtggcacgatctcagctcactgcaaactctatctcctgggttcaggtgattctcatgcctcagcctcctgagtagctgaaattacaggcgtgtgccaccacgcccggctaaattttgtatttttagtagagacagggtttcaccatgttgcgaggctggtcccaaattcctgaccttaagtgatctgcctgcctcagcctcccaaagtgcagggtttataggcatgagccactgtgctcggccagaataagttattttgacaatttttttggccagtgttttcattgcctttgtgaagaggtggtttttgattgttatgctgctattctcactgacttcactcatgctattctgtcatgcctcaatcaatcttcatcacagagcacagtctcttcatcatttcccacaaaatccagttacagcaagtaattatttttcaatagactttattggagtctatttgaataattggcagataaagtcccatttttgttgtatgttactttttgccatcttggagggttttaccattttttcctttacttatctcccaccctatccccagatgcctctccctgtaatattaaacctattctttcttctttgatcctacttggtgttattttcttctctaatcattgtccaaaaccaatgaagttctcttagaactttggaagaattcaaatgaattagaattatattttgttataaatattaaagtcccaggtaagttgcatatagatcatttcaaaatgtcttttcaagctatccaatgacattttggctggctgctgcttgtgaaaccaccaagatctccatcctccttctttctttctttgtctctctccacctgaattaatttttgtcctttcatagatgagacctatttttttttgtaacttggagagaggtgagaaaatttggatcagtaaaaaggctaaggtgaagagatgagaaaatattggaggaggaaggcataccatctgttctccacttgtctcctcatactgattttgagccccctgtagagacagaattttagagatagaagtggattgaaatatgttcaaaaggagctttgtgagatgtacagaaaatacactctcttttccagcactaatggacattctaaaaaattgggcatgtattaggctacaaaggaagcttcaataatggagacattgtagctgcattctctttttggtcagaagcaagacagggataaccactatcagtgctactctttgttattttcctccagtagtatgtttgcagaaatattctttagtgtatacatcagatgatatcgtttggatatttctccccactcaaatgttgaaatttaatccccagtgctggaggtggggcctgatgggatgtgtttggatcatggcagcagatccctcatggcttagtgctgtctttgtgataatgagctcttgtgaggtctggttatttaaaagtgtgtgacactttccaaccccaatttgctccttctttcgccatgttacatgcatgctgcttctttgccttctaccatgactgtaagcttcttgaggcctccccagaagctgatcagatgccaacaccatacttcctgtaaagcctgcagaactgtgagccagtcaaacctcttttctttataagttatccagtctcaggtatttctttatagcaatgaatgaatagctaatacagtagggactatgcctagcactttctaggcagcaatggaagggctttgtatattcagtagtgagtgttcttgttgttggttgagtgaatttgtagtgttagggtgagtagtgtgagatttgattgattagagaattccctgtgctgtgtttaaacattgtttttggctgtatagcattgaattctcactgcctatctctgctggagagtctgtgatctatttaatatatcttaatatctttcttttctacttaaattagcttagtagattttattaagttacatctgaatatttgactgacaaaaagaggatcttgctaaagctaagatagtaaaaatagtatagtagtattgcagagaaacaacaagatgaatataaaactcaggaagttcaataggtacatttgtgaatcaagttcataggtgagtctaatatgataacgatgatgccacaaatctttagggaatggtggattatttagtagattgtgctattaaaactgtcctgctctatggagaaaaataaagtagttgggtcttctacagatgtaaattttagatgaattaaaacctaaatgtaaaaaacaaatctataaagataataaacacagtgtgggaaaatgtatttgtggctttggggtgaagaatgatttctaaatcaaaatccctaaagcccaataaggtgaaaaaaatgataatgttgattccttcaaaattaaggatttccattaaaaaaaaaggacaccatagacaaagctaatagactgggaccatattagaaaaagatacttgtgattttggatacagcaaaaaattaatatatgagaaactcttatgatttactgagaaaaactagaggtctaattttaaagtgagaaatcatgtatatggataacatgggaaagggaaatacaaatggctcaatagactaataatcagggtaatgcaagttgacattccatactcagtagattggtaaaagtagacagttttataatactaagtgttgttgaggttatggaaagactggaatgctcatgcactgctcgtagaagtgtaagtggctgtagctactttcaatcattaccgtcgtgaaattgagtatgtgtatgtactatgattgaacaatccttgctggggacatatcctagagaaattctcacatagttaataggtgaaatgtaaaaaaaaaatgttaattgctgtgtttgcaggagttacaggcagcctataattccatcactaggggattgcctaagtaagtgtggtgcatgctgaaatactgtgcagtagttactttgaaccaaaagtacataaccagtatctaaaaagagttttaagttatctgtagctctgtactaattggcttcagtaagaagctgcttaaagccttaatcagcttacttgtcaaattgtattccttttgtgttcccctctgtgttttggttgtcagaaatttcagagctcaaattaatcatagtagcgatcttagtccttccactaaatatatctgtccacttccctttgatttttctatcctcattttagaggcatttttgaattctgtattttatttggaagctttttgaggtcgtatatataaataaaaggtttctgttggacctaaatgatcatcttatcattattattatttttatttttagatggagtcttgctctgttgtccaggttggagtgaagtggcgcaatctcggctcactgcaacctctgcctcccgggttcaagtgattctcctgcctcagcctcccgagtagctgggatcacaggagactgccaccatgcccaggtaatttatatatttttagtagagacagggtttcaccatgttggccaggctggtctcgaaatcctgacctcaggcaatccacttaccttggccccccaaaatgctgggattacaggcttgacccactgctcccggctcatcttatcattattaaggactctgtcattaagaaaagagaaaagattaggaaagaaatggatttcctctcacctagaagactattaaagaaaggaaaggggatgcataaagcaaccatctgaagatggaaaaagaagtgtgttactccatgaaagtatgtgtttaatagccactcacctgaatgaagaacatcttttagtattcagaaggcttttccaaaaggcagttatttcctctggatagccttcatattcctatggaaattgaataaggatgaaaaatttgaacaaaagcaaaggacatgaaatctcttgaagatatgagaagctgtgaacacttgtcttagagggtgcatggagaaattatttttcatgagttcccatgtagtccgctaggtggcggaggttacataaaaaccctactgtataaacactgaattgctacacacttgtgtttcctcttctttttcaagtaaaatcccaaggaaacctgtagagtataataaaagctggagatagaactttgtagtaagccctatattaataacaataacagtgtcaggttgcaaaatgaggataggtaccataccaaaagagatgatctccaaatgcagtttttgtttcttttgtttacagaaaaattacaactgatttttttttccatatttgttccaaagatcaccttgaatgcaaggaatcaaattttgatcagtatatttacacagtaacttttgtaccttaaaaaattcatttcttatctactgcagctactaatatctcacgctaattattttaaacacattagcaggtcatcatgtcatatgtgacgggacttagcatactttttgtgtgactatatcactttaatttgtgtgatgaagcagtgccccattaattatgtgactccttctaatacccttagagaagaaaggaagctccttgaatactaaatttgcacaaccacagtgaccttataaaggatgcattcccttttaagattaatttctcagaacaaagcacagtgacgtcattactaagcagcctcacaactgtagcaacccttctaaaggttgtagattctggctgatgatgtcactgacacaaaggaaaaaatgcaaaacaggtagtcttaaataagcattctggtgagaccaactgcattttggccatggctttgcagagcactctgggggcggtgtggctagggcttctcctcaactctctctggaagggtgagtagcctccttcactatttggttttgtaaaagtgtatgaaattgttttaaaatttggactcatttttaatacaaaaacaagagaagtcagatctaacattcactgtacctaaggggcaatcaacaagccaaatagtactattaaagtgacagccctttttgttttctgtagttgcagaaagcaaggaccaagtgtttcagccttccacagtggcatcttcagagggagctgtggtggaaatcttctgtaatcactctgtgtccaatgcttacaacttcttctggtaccttcacttcccgggatgtgcaccaagactccttgttaaaggctcaaagccttctcagcagggacgatacaacatgacctatgaacggttctcttcatcgctgctcatcctccaggtgcgggaggcagatgctgctgtttactactgtgctgtggaggacacagaggcagggaacccatgaagagctgaacagaaacagagatcacagcctttgcaggaggcaaaacagagatgagcaataactttttcctccttaattcagtattacccaagctttttcatttggtactgctattaggaaaaaaaattgagtccagacatactatatattaacaaatgtctataaaaatatgcttttaatttttttttgagacacagtcttgctctgtcatacaagttggagtgcggtggcatgagcatagctcattgtaacctcaaactccagggctcaagggtagctgggactcagccttctgactaggtgagactataggcatgtaccaccatgcctagtgaattttcctcctttttgtagacacgagttctctctgtgtcatccagactggtctcaaactcctggcttcaagtgattctcctgctttggcctccaaaagtgttgggattacaggtgtgagccaatgcacctggaccagaaaatatgtttttaaagggtgattatttcaaatagtcttcctgatatctgaaacacttttgactcattttcttgagatctgattagattatttttgtttttccctcataaaatggctgatgatgaacttgtgatagtagtaagaggcatgtccactcttccattttcttctcttttttaaaaattcagacaggctggagtgcagtggcatgatcatagctcactgcggccttgaacttctggcctccagtgatcctcctgccttgacctcccaaagcactgggattataggtgtgagccaccaaggccagtcaactctttcattttcttattgctgtctgtgcttaccttttaaatactatctgctaacttcagtctttttgcagcaatattttcaaaacatgtcaatttgtaaaggatggtttagttaacattgggtaatgtaataagaagtgagaaaggaaggaataaatgagtggctgatacctacagccctgcatttgaaatctcaatccatgcctcagtatactttgcttataatctagcatacagtcctgttgagggtgccagtcaatgagtatatgaaatattagtcaaactgaatctccttcataatatttaaactaaaaacaaatgcaaatggaagtatttgtactcattgcaatgcattcttcccacactcctgttaattagcttggtcctcccaccccagatgtgtccctcccactttagagaccaatgccttagggtagcccagtggttcttaatatattttatcctcctagatcggaagttttgtgaaaattggatttgttttcttggggggccatattctagataaactcaatcagagtttgcaggggtgggacccagaagtctatattttccataaagctctgctggtgattgttttgctcagccagggttgatctgtgaatttcagattttggaccccaggtgtattactccattctcacgctgcaataaagaaatacccaagactgggtaatttataaagaaaagaggtttaattgacttacagttctgcatggctgggaaggtctcaggatacttacaatcatgatggaaggcaaaggggaagaaaggcaccttcttcacagggcagcaggaaggagaagtgccagcaggggaagtgccagacacgtataaaaccatcagatctcgcaagaactcattcactatcatgagaacagcatgggggatgccatctccatgattcaattacctcccaccgggtccctcccacaacatgtggggattattacaattcaaggtgagatgtggatggggacacacagccaaaccatattaccaggtcttgaggctttaaccactattctctacttccttttaggtagaattttagtaacagagaagggcttcaggaagtgaactgtacagtgctattgcttgcttacacagtagactttcagcaaatgctgacatttggaataaaaagtgaagggcaagatgggcacgatgggttatacctgtaatcccaacatttgggaggcggaggtgagaggatcccttgagcccaggagttcgagaccagcctagtcaacatagtgagaccctgtctttacaaaaaataggaaaaattagcctggtgtgttggcatgtgcctgtagtctcagctacttgggaggctaaggtgggaggattgattgagccagggaggttaaggctgcagtgagccatgagggcaccattgcactccagcctgggtaacagcaaaaccctgtctcaattaaaaataaaagtggccaggtgtggtggatcatgcctataatcccagcactttgagaggctaaggcaggtggatcgcttgagctcatgagtttgacaccagcctggtcggtactcaaaataccaaaaattacctaggagtggtgtgcacctgcagtcccagctacttgggaggctgaggcaggaggatggcttgagcccgggtggcagaggttgtagtgagccaagatggcaccactgcactccagccagggcatcagagtgagaccctgttaaaaaaaaaaaaagaaaaaaagtgaagagcagattgctgatgacagaagaaaaaaggtattttagtaatatcaattgtcatgaaactttgccaaaatgtcataagattgattcttaaatgcaaatttttaataacacccaaatatttccattggatataagtgtaaattggtatgtttgtgcttgtattacttctttaggcatattatattttgggttgttgcttgcttaaaagtgtgttaatcttattttttaaattttatttatttattttttctaagatggagtctcgctcttgtcacccaggctggagggcagtggcgcaatctgggctcactgcaacctccgcctcccggcttcaagcgattctcctgcatcagcctcccaagtagctgggattacaggcacatgccaccatgcccagctaatttgtatttttagtagagacagggtttaaccacgttggccaggctggtctcgaattcctgatctcaagtgatctgcccgcctcagcctcccacagtgttgggattacaggcgtgagccaccacgcctggcctaatcttactttttaatcaaatgaaattcttgagaagaggaagcatatgtgatccttctttcaggttgtcctgcatagttctgtgtgcactgtagtggctcaataaatcatgaacacaggtgtgacctcattgctttggcaagagagaccagagacagaaaattccctttggttacattaggaagttctttccagttcacagaggagtctgtacatgtggtatactgaaaaccctaccttttaccctggtgttttgattctataattcaaactgtcaacaactagtcttctaccagattttttccagcttacatgaagaacactaaaggcattattatccaaaggggaaaatggaaaaagagagtgaaataagaggaaaatgcagttgatgcatttttcttacaacgaagagagcagccatgaagtcccactcttaaagttataacattatgaagctcccagttcagtggtgacaaggacagaaacatccacaggagaataaattttttttttttactcccaatcctgggagttcatatatatgaatcgaaaggtaactgtgtctgtcactggctccatgagaaatctgaaagacttgccatgccttgctactgtatcctacgtcctctgacttcactgctagttttcttttcttttttttttttttgacggggccatgaaaaccacctacggtaatcttctgtaccttctgaaaatcatggcgccacagagaatggggggtatttggaaggctgtgttgctttcattttcttcctaggattagtgttatgggttgaattatgttccctaccccttgccccgcaaaaggatttttttttgagtaggtgacacgggtaagtcctagccgtcagcacctcagaatgcaaacttatttggaaatagaatctttatagtggtgataaaattaaagtgaagtcaaaaggatgaaccttaagccaataatgactggcgtccttataaaaaagggagatctgaacacagagacagacatgcacagagggcagacaatgtgaagaggcacagggagaagatataaaaaatgtagtatttttcagaggtttgagatagcatggatatagctgggaccagaacacagcaataaactgtgtggggagattgaaagtcagatgtgaattaaaatattttgcagatgcttgtgtagatagataatgatctcaaggtccagtttacatttattttccctgtgataccttggaactacataaattgcctagaaattaggcgtaatctcaggaaaaggtaggaaaactctgatttgactgagatttggtttctgatacctggtagactatagctttaaatagaaattaaatatagttatgaaaaaagtttttttccctccttcagcatctacttttgtgtattgaaattatacttacagatgatttaaaactttgctttcttggaaatgtatgaaatgatgatgattttggtaaaagggataatactgtcttaaaccacataaggggaagacactgtcaataggactctcatggatgaatagtattccctttggactcatttttgaaaacctgaacaataaaatagaagatttaaaagctacacataaactctcacaaattcatctgtgacatcttttgcatgatctttgttctagtatttaactgaatttttccataatcttctatagccattttctgtcctgctgttctacattcttttaccagattatctcaaaatgtatccttgattttgttattccataaataaaatccttcaggctttttaattttatatataagaaagaaacaaaaagaaaaacagcaaatctaaatagaagtaccctctgcttagtaaagctgtcatattatgaacccaatgaaactttgctgctttactttctgctgctacatcccctatccccttgggtcaccaaataagtttattctctagcctttaagacctgttggcattatctcctgtatgagttgtatcagattattttctctgcctgaaatgccctctttctccctttattcagattgtagcccaacctctataacttcttcagctgaggactctctcccttgtttgtgctgctatagtataatgatccccaaagtgtttgactgtgtgctattatcagtaaagtatgttactcctccaacatatgcatatttatatgctcatagattatgatcgtgtgtgcaacaaacaaaaatagaaattaggaaagtttgagataaatttaatactaaatgttgtgattttcttctcgcacgcagggggatcatcttgtgtagcacatccgtgtcccttctacaagatgaactaactagactaacttggtctttaactagttggctaaatttcttaaactttgtgaaactctttcttctctcatttgcaagaaatatctgtaatgatttttctattgatataattcttgcacattttacttcagatagttaactgttcttcccctaagtgttcatctaccaaaatggatggtaagtttctggagggcaaggattatgtcttgttcctctgtttatttctcaatgcaaatggtatcttacatttaacaggtactgaaaagtgatttgtgaggatcaatggattcacagggttttctcctggaattgtcagaatgccaaggcagttcttaagtagattcctggatgaggaaccctctctgcaaaggacaaccatttgtgatgaatgaacggaaacagagctcttagatcattgcgtataagatggcctctcattacatggatttctgctagctctgtgtacttatttaaagtttcaatcatctgacagttatttattgggtgcccataatttgccaatcacatgttttttttctttatatctgtcccataaaacaaaacaaaacaaaacaaaacaaaacaaaacacccatcctcagagcttctctacaatagacacacaccaaactaaaaataaaaatgcatgaatctcaggaagagaagttctaaaaaacaatctagaccatctgcccatgggatgcttgattttctcaacagcatcacatcaagggaattgccaatattttcacaacagcttcttgcaggagggttcttgctgctcccatactgtccattcaaactccaggcggctgtgagttgaaaatctattattctttatgttgaggaaacatctgtgttcctgtggcttctacacctttgggaatctaaaagagttcacatctctcctttacacattttgaaccagatacaacatttccacagagcagtttttttccatattaaatatttgtaagtttcctaaccattatatatatatatatatacacacacatacatatgcgctacaattttgatttccctctttgttgtacattttaaaccgtttccagttggcttgtatttcttttaatatagaattcttagaacttaataaaacacttcagatgtggcttgacctattttaaactacaaggaaagaaggaggaaactggatgaaggtgaggcaaggtaaatatattaaacccagagacactacacaaatcttttcattccactgagacatggatggccactgattcttgatctcctttgtttggaggtaggagggcagaagttcaaattacagatttgcccccacctttcttttgagagttccctaacttatgtgaagtatgatttgcttagttggactgtatattttgtcagtttcatggaaaaagcactgatttctttgttctaacaactttattttgtgctgatttttctttgatacttctaaaataaatgtaatgtacatttcagagtctaatatttgcaaagggatttgtcattagtttacatgagccatttcttgtctcttgtgaaatcaatgatatttacagagttctgatttttttttttttttttttttaaagaaacaaggtcttgttatgttgctcaggcttgccttgaactcctggtctcaagggatcccgcccccacccccgccctgtctcagcctcccaagtggctgtgactatagtcatgtgccaccgtgacaagctaagagttctgatgtttgcaagtagtttcttgagaaaggcattggcagccttggtgaggcatctggagtctcagactgatactccttgacactgctctgtgctactctaattgcccttgtgttgtgatgtgcatgtttcagtggtagttaaattaaggagtaaaggaaactaccctgaggggagcacagacatctacctgcagcattttgggcacattccccattggcccacccatctcatatttgactgacctctaaatggatagcactacacccagtttactatggtttggagaaacagttcatgtcaactttctgtgaatgtcatggttctttcaatagaaatcggagagttggacagaatagctaaaaggtggtccagactgggtgcatatggcaaattgataagaaagagtcaagttttcatcaaactttctgtacataaacctgtaccagcatagcagtgagcaagaggtgcaggagaaggtggatgacctttgagtgctggtgatttagaattaattatccaggagttgttttggttcagtggcacatacatgtgggatcggcatttggtataatgcactcaatggacaatatgacctctaaagttctatttaacttattcaagcttgattctgtaattttattatgataaggaagctgctttccaatattatattgtctttaatagaaagcaaattaccaaaattgatattccccctatatgatttaaaggaatatgcctttgaagtcggtaaaatatgggttaaaaatctttgttctttttcttaaggatgatgagcaaattattcaattttcctcaactgtggtcccctcatctctaaaatggggcatcttaggaagagtaaatgtgacaaagaatgtaaagggtttaatgttatgctcacggcgacatttgatgaataatttcttaattaatctcagaaatcaaagcagataagctgaatagctactgaggctatgttgttcaattttgaaatttcagtctaggcccatggaattctttgggtgctgctggttactttgtgtgcagtgcattatgtggaggtccctgaatccttctctatctgctgagcagttaaaaggcagttctttaactggaagcaaacacgaagactaaactgtcctagttttgaggaagaataagaaggaggaggaggaggaggagaaggagaaaatgaagatgaagaagacgagaagaagaagaagattaagaagaagatgattaaggattctgcaacagttctgtcattgcaaatgactacccatttctaaccacgacataaattcagaggaaaactttcctctttctatagctgaacatgcttaattaataaatatggttagttccttccataagtatcctttagggggagaccactaaacaatcaaccatttctagcacaaaattaaaaatatcagtctcctaaatatttagttcacttgaggctcttggcattaattattaaatggatgaaggcaaacaatatctcagccacttgcacgatctaggcataatcttgtgtgctgtatctgtagaggtcagaggaagtagggattggaaaaataatcaaggcactgaagtctacactagactactgttttagttaaacttattttatttgcttttttatgttgatcatatcatatgttgatatatgcccatatatgcgtttatagggcagcaataaactccagtgtcaggaggctggacagtctctgttttcctcttcaggtctattctatcctgctctgtactaaagtctatattagactattgttttaaacttattttatttgtctttttatgtttgtcaaaatgcagtatagctatgcccgtatatgcatttgtagggcagcaataaactccagcatcagagggctggacatttctccattttcctcttcaggtctattatatcctgctctgtaccccaggaggctgacttctatacgttatgtggactggtctcccatgtccattggcatctggttgggtttaccccagtgggaggtattagcaggagagagtggtcaagatatttgcattttaggatcctttctttcctctactgaagtttacagctcctgttgggtctacccagaatatggtcaagaagaggtatttagactgtaaagggtcatgtcgcctttggcctgtgattagttacaggtgtcctgagattagggtaatttcatcttctcccgtccctttgggcctaggagtggtgaaatcttctggctgttattagccccaggtgcttcaccttcccttgtagttttccctaaattttgcacatacacttaaaaatattctttttgttaagctttttttcaatgattttctcgaggcgattgccaggaccctcaaaaagacaacactaacactcattttaggcttgaggcagagagagaagaaagagaagaaattcactatatgtttccatttatgacaagtctctctggaacttgaagattattgtttaaagacagtttaccaattccaaagaaaaacattattatatggctaagttttcaatgattaaatatgagatctttagcaaagcttttagaaagaattatgttccactttttttctgattcaaagcaaagagatttttcatcctttcctcagaatatatagtgaacattatttggacactattcaaaagaaacagaaggcaaatcagaggaacaacttctttatattgatacatgctttttacattaaaattaaaatctatcaaagaatcactcagttgctattgttgcctttttttagtataaaactttagcatgccatccctttccaatgaaccccttttccccatcataatacatcaagtttcgttaaccatacattttttgctgaatacgtacttcatttgaagtctgttttaagtaggctctgcatgtggaaagtacctgttttgcaaccccttctcagagtttcatttttttgttttatatgtactgtttaatatgacaaatgctccaaaaatatttataacacctattcgtacttttctcactctaaaaatgtttaaagagaagattcaagtttctttttgccctaaagatcattatgggatgggctcctaataggcccaacgtggagaaaattctgagttatttttggtcaaagaggtttacacagaagccagctctgaattacttctaacgagaagagcaaggctcctgttttcgcctgtcatttatcttctcttgccttactcttttctcctattttgctttttcttatctctcactttaaatttttctctccctcttgatgcaaagctatattttcctttctttttctgtgcattttcccatcctatttcccttctttctgtctctacattatcttaagagagcacaaatcatttacagcttgatccactcagcctgaatcttttccactttgattcacaaacttctatttcttctcctttgaacccctaatttgctccctatgtccctcatggagcgtgtaaccatccaaaggttggcccagggataaggccaggaagcaccagctgcttgacagtaaagtcgctggtcctacgtgtgggctctagggggcgatgcagtgtaaggtctgtcctgggcataggcggagcggcagtcttgctcctcacagagctttgaggagctggatcaaaattgtgctccacagagagaagataccggtgtcgggaagcaccagtgccctgaggaagggccatttccaaaagccctgtgctgacacagggttgctggttcctcttcaagagcccactctctggggtggggccatatctccagcagaggtgggctggaaaggacccccccaatcccgcccgccgtgagcttagctggagccatggcctctgcacccatctcgatgcttgcgatgctcttcacattgagtgagtaatatccccttcccattttccactcgcatgatccacttacatgctctccagcagcttcactgatgcagcatgattaatttacaggtgggctgagagctcagtcagtggctcagccggaagatcaggtcaacgttgctgaagggaatcctctgactgtgaaatgcacctattcagtctctggaaacccttatcttttttggtatgttcaataccccaaccgaggcctccagttccttctgaaatacatcacaggggataacctggttaaaggcagctatggctttgaagctgaatttaacaagagccaaacctccttccacctgaagaaaccatctgcccttgtgagcgactccgctttgtacttctgtgctgtgagagacacacactgataggggctgcagggggagcagaacacaaactcttgagtctggtaaagcccattttcttgaagtctttgttccttcacatgagaacggtgtgcttccaggatatgtcacttattatgttaaactacaatttaaaaccatagaatttgctcattcagcaagtgtttattgagtcctgatgtgccaggtactgggcaaagcaccggtcataaaaaggtgaaagaagtgtaaaacaaatagaaaaaaacataggggaaaattaccatgacattggtctgggcaagaagttccttccttccttccttccttccttccttccttccttccttccttccttcctccctccttccctccctgcctctctctctttctttctttctgaaaaggggtttattttcaacagacatttctttttataccgaggtgaaatgtcatcatcataataattttgcaatgttacataccctgttgagaccattaaaaaattaggttcatggtatacacgtccaagtttgttacaaaagcatattgtgtgatgctgtggtttgggcatctattgatcctgccacccgaagagtgaacatagtacccaggagaaagcttttcatctcttgtgagcaaggaatttttggatatgaccccaaaagcacaggcaacaaaagcaaaaatagacaaatggggctatattaaactaaaaagcttctgcacagcaaaagaaacaataaatagagtgaagggaaagcctatggaatgggaggaaatatttgcaaactctacatctgataaggggttaatattcaaaatgtttaagaagctcacataccaaaaacatccaaataacctgattaaaaaataggccaaggaactgaatagtcgtttctcaaatgaaggcataaaaatggccaagaggtatataaaaaatgctcaacatcattaattatcaggaacgtgcaattaagaccaccattagatatcacctcacaacctattaggttggctattatcaaaaagacaaaagataacaaccattgttgagaaggtgaagagaagggaactcttccacactgctggcaagaacgtaaattccataatgtgcaaccattatggaaaacagtagggaggtttctcaaaacaccaaaaatagaactactgtatgatccagcagtctcactattgggcatatatccaaagaaaatgaaatcagtatgttaaagagatatctgcactctcatgtttattgcagcactattcacaataaccaagatatggaatcaatctaagtatctatacttagatgaatggataaagaaaacatggcatataaacacaataaaatactattcagtcttataaaaggaagaaatcctgccatttgtgacaacacaattgagcctggaggacattatgtcaagtgaaataagccaggcacagaaagacaaataccacataatctcacttatttgtgtaataaaaaggttgaatttatcgaagcagaatagaattgtggttaccagaggcttgtgaggggaatggaaagggattggagagatgttggttaaaggacacaaaattttaattagataggaagaataagttcaagatatctactgcaatggtgactatagctaataataatgtatttgcaacagaattttttttttttttttgagacagagtctcactctgttgcccaggctggagtgcagtggagtgatctcggctcactgcaacctccacatcccaggttcaagctattctcctgcctcagcctcccaagtagctgagattacaggagcccgtcactaaccctggctatttttttgtatttttagtaaagacggggttttaccatgttggccaggctggtctcgaactcctaaccttgtgattcgcctgcctcagcctcccaaagtgctgggattacaggcgtgagccaccgcgcccagctgcaacagaaatttctaaaaattgctgaaagtagattttaagtgttcttaccacaaaaaggatatgtatgtgaggtaatgcagacgttaattagcttgatttagccattccacaatgtacacatatttcaaaacattatgttgtataccatacatatatacaattttatttgtcagtttaaaaaagaattgaaagaagctatctttgatctctatgtgccaggtgtgtttccaaacattaatgaacgcatttaattctcacaagtattatcatcagcttcactttacagatgaagaagcaaagtcacagagaatttaagtatcttgctcaagtcacaaagttaataactggtaaattgcaacccaggcagtgtgtctgtagggcacatggtccaactactccactcctctgccagtctataggcttcttggggcaagagactgattttggtgatggtgtagccctaactccagaaagggtcgctgtcggaaaagtgttggttatatgaatgaacaatacactgacactctaaacagtttggtgtgtgccaagatagagaattcaaaaaatgctctatgagatgaggatataggaatagcttagctgtgaaagaagacagaagcagtctgtaatgggaggagagtttgaatcaaggaagggtataaacgtgtagttcttataaggatagttgcttacggttcctatgttcacatcttccttatgctcttgagaggaactggacttaatgcacttttctctctttatcttttcccaaatttgagtgtcgtgggaagggctctgtttgactcagtgtgagttaggtggcttttccttggactaatcagtggtggccatgggtacaggctgcttggattagcccagcttggcttccacctttggtggctgggggtgggagtgaggattctgcaagttagcagctctattttgaactgcctggttaaaaggagtatgtccccaaataagttaatttttacacagggatctacatctgtttattttttcccccaaatggatagccagtagttcttacaccacctcctgaaaaattcacttttgccccatagatttgaaataccatatttatagtacattaaattcctagatatactcagatctacttttgaactcttgatttttatagttttgtgctagaatgtgctgctttagggagattcaccctgcagcctttggtttgtaccttgtgatttaccagccttcttttcctatccttcaatccatcacataccttgagaagccttatacacaaggatgtggacaccttagcccacatgtctacagtccaggcaaacagtgatcttttggccacccattgggcctagagttgtgtacacaggtgggatatctgcttctgggaagataatccttgagataggcccatgcagatcttaaaagtgtgtttggggatgtttgtgcagggaattctgaaatcctagtacccagaatatggtcaagaagaggtatttagactctaaagggctatgtctcctttgtcctgtgattttctcacagggaaagggataagaatagctgaataatagctggggtggaggcacagaactctgagcagggacgtcacttgctcaggtctaagggtggcagtgttctgtaccattactgccagaatacatttgtattcatgaaaccatggtatctgttttagatttaagtatacagttgccataactctaggtaagctctcagccaccatcactgttttcactccaaaggaagttcatgtccacagggatatttttatcacattacaccattgacctggctgtgtggcctgtttctgcctttgatacttataaatacaatttatgcaagtcctgcaaaggaaagaagtctttctatacaattatgatgtatttattcatttagctattcacttattcactcaatgattatttgtggagttttgactatgtgcttggcattgttatcatccctgcagatgcagtggtgaacaaatctttccctccagtcattccccaggctgcacacgtgttcatatcacttccctacccaaacagaactacttcttagtcaaagagatacaactctcaagatgatttccttctcaggaaaattctccaaggttaagctaagccttagatattaatcttttgtcatgtggtagtgattggtggtggtggtgatgggaggggagttatgtagggaaatgagaatctatattttcccccttttttaaggtggctcagagggaacaactatgtctttttagaagttctgttttgacttaaagaaaagttagtctagcattcctttttcctgtttgttgggaaatactccttataaacagataaacttcaggaaaaatgagaaattctggaaaacttatcttcataaggtttatttttctccccccttttatatcacttcaagaactttgtggaaagagaactgaattaagaattagggagcataggttgtttctgattcttcctctaagtaactatgtgacattggacatgccatttctactctatgtgcctcatctcttaattaatgaaattgagataactggaaggattgttgtgaggattgctttatgtgtgacatatgtcttggaccccaaataagagtgggtatttaggtgggcagagcaatcagatacctaagacaccaacactgtggagcccttataactgccctgaactgctgacatttgaactgtatcatgataaattactttattttggcctttgttacatcagttggccctgtattctaatttaatcttcgatacctgaaaactgctttcagaaaaggagctaatattatctgtgtacattgtagttaagttgcgtttaagcaccaacttaaaaaagctatttgtggaatcacagcttttgtccttgaaatacacttttaagcattttagagaaagtaaaggtagggaaacacgttttggggaagaaaagttgtcctggttttgctgagaacactatgtagacagtcatcttctcatccatgtgagaatctgtctctgcctggatacaagggagacacctctccctgcagtcttcccatgctacattcagtcctccctcctctcatctttccctgattgtgtagtgagtttcactgggttctctgaaagaatctttgaattccattctaattctcaaaaattgtgcttctgtgatatgcaagagttggtggggttccaccatgaattccaggagaggccataggtaagctgtggtcacttgctgtcatcagcactgcagggatcccacacatatcctgcaaaatgcctccttctgcagtataagtaatgaacaagtattaagtaaagtgatatttcatttaactattaaattagcaattgtaaactgtataaacaatattgacaaagagtaaatgggtactgaagtgtactattgatggcataaactcatatgatgcttttgggaggcaatctggcaatcttcactgtgtctcttttctcactttttacttgctcttttacccactgaagtgtggttttaacttccaccattggcccaaactattcttgccagggttaacaacagtttcttgggttacatccaatgaatgattgattattccctctttgaaacctggtcctctttcggtttctggtataccactttccctttaaaaaaaaaatttgagagctgattttcaatagatcacagtgagggagctgctctgctatgtgtgaaaccccagcctacctctttctttttgatgttcttatatctttggctgaacctgcactgtcttttttcatgggcttttcttctgctcactcttttatcgggaacctgccctgatattcacgtaggttcctttctatttttcccaagcgtcagccggcttgagaaataaagggacagaatacaaaagagagaaattttaaaactgggtgtctgggggagacatcacgtgtcagtaggttccgtgatgccccacaagccacagaaaccaggaagtttttattagggagtttcaaaaggggagggagtgtgcgaataggtgtgggtcacagacatcaagtactttacaaggtaatagaatatcacaaggcaagtggaggcagggtgagatcacaggaccacaggaccgaggtgaaattaaaattgctgatgaagtttcgggcaccattgtcattgataacatcttatcaggagacagggttttgagatcaaccggtctgaccaaaatttattaggcgggaatttcctcttcctaataagcctgggagcgctatgggagactggagtctatttcacctctgcagtctcgaccataaaagacaggtgcacttagggggctgtttataagcctatacctccaggcgcgtattctctttctcagggatgttccatgctgagaaaaagaattcagtgatatttctcccatttgcttttgaaagaagagaaatatggctcagttccccccggctcaccgcggtcagtttaaggttatctctcttattccctgaacaattgctgttatcctgttcttttttcaaggtgcccacatttcatattgctcaaacacacatgctgtacaatttgtgcagttaatgcaatacttacagggtcctgaggtgacatacatcctcctcagctgacaggattaagagattaaagtaaagacaggcataggaaagcacaggggtattgattggggaagtgataagcgtccatgaaatctttacaatttatgtttagagattgcagtaaagacaggcataagaaattatacaagtattaatttggggaatgagtaaatgtccatgaaatcttcacaatccacattcttctgccatggcttcagccagtccctccgtttggggtccctgacttcccgcaacactctttaaagttggtgttcttttttttttttttttttttttgagacagtctcgctcttgtcgcccaggctggagtgcagtggtgcgatctcggctcactgcaacctctgcctcccaggttcaagcgattttccttcctcagcctcctgagtagctgggattacgggtgcctgccaccaccacacccagctaatttttgtacttttagtagagatggggtttcgccatgttggccaggctggtctcgaactcctggcctcaggggtccgccagttggtgttctttaggattcttcccttgacctatttattttctcagtcaaaaattctttctgggtaatattatccatgctcatgcttccactattatttgctgattattttcagctcatatatctcttctgagcttcagtttaatatatcaaactgggtttttgacctgtgtgaattttccagaagcaccttaaatcaaatggtgcaaagcttagctctttatctttcttcctttctcccccacttcaccatatgaaacaaaacaaaacaagataaatttgctccttcttttgtgtttttcatatcaaacaacaggaccatcatctacccaagtgccatccactctcttgctccaagcctgtccagatgctgtgccttctgcctctttctattcagctcagtcttcatcatgctcattcttcctcttctcttaggttttagtttaggtgagtgtcactccttctgggaagtcttcctgcagtcctacaaccaaaaccatttcacttccttgtgttgctatagtactctatgctttccctactatggctgttatcatgaggactatcattgcttttaaaatcctcttccttctcactagaccactgggtctttcttgtcattgaatggccagtgtctacctcagtgcctgactgtaaaaggggctccacaaatatttgtttattgaataaatggatacttcccaagactcttaaaatgttcttacacgaatccaggaaatcctctttgcagaagctagtctaaataaataattggaagtttagacaaagatttatgtacaaaggtttttatgatagtattctttctaaaatccaaatgtctaatactaaagaaattggtaaataagttatagcacatttgtaccatggactatgttgaggctattaaaattggatttttatgtatacttgttgacaaaaaaaaagtttggaaaagaatattaagttgaaaaaacctccagcatgtgcaaatgtgtgtgtgttcatgtgcacacaattcaattgtgctaacaatagtcatgcaaaaacaaaggattaaaaagcggtatgcctcaatattatcaatgatttttttctgggatatggtattacacgtgattttaaaacactttcctatattttccaaattctgtatttagaattcattattcttctaaccagaaaaaaaatcccacttaaaaagaatttaaaatatccctcttgtagttggctattgctatagggcgtggttttcttccataaccttaggaactttctaaaatttgctttaacaatggtctaaattttttattacaatatacataaaaaacaacattaatgtatgtgatatgctcctatgtgttcacccaaacacttttgaacaccaaaaaatgttttgcaaaggagtatatatatattagttaaggttctccagagaagcagaactaataggatgtctatctatctatctatcatctatctatctatctatctatctatctatctatctatctatctatacataaatatttattggaatatgtatatttattggaatatacgtgtaattattggttatatataaatcttggtccaagtctaaaggctcaagaatcagaagcactgatgttagagggcagggaagatggatgtcccagctcaaggagagagagaaaagttgtccttcctctgcctttttgttctattcaggccctcagtgaatcggatgatgcccacctgcattgattagggtagtctttactcagtctaccagttgaaacgtgaatcttttctgaaaacaccctcacagacacaccccacaataacattttaccagccacctgggtatcctttagcctagccaggttgacacataaagtcaaccatcacaacctacttaacatataatatataatataattattagcaccatatattagtttgctaaggccgtggtaacaagaggccacaaactgggtggcttaagcaacagaaatgtattgtttcacagttctggaggacaggagttcaaaatcaaggtgttggcatggttgtttccttctgagggctgtgatggaaggacctgttctacgcctctgttcttggcttgtagatggccatcttctccctgtacctcttcaaatttttcttctgtttttgtccatttcggtgtccatattccccctttttgtaaggacaccagtcatcgttcaccagtttggattcgagcccacccaaataccacattttaacttgatttcctgtaaaaactgtttccaaataaggtcaccttctgaagtactagggatttgaactccaatatgcatatatattttttgggtgggaggaaaacacaattcaacccacaacacaccactaccatcagtaattactttcattccataggctgagggatagaaaaacttccagtgtttctacctccagttgcctggtatccagtaatattctccaaagtgaggtaacaggtggcaacacggaaacttcaagttccgttttttggcctgaaaaaggaagaccattttggcttggtgatatttcctgcattaaacatagtttgtatttctttttttttttttgagacaaagtctggctctgttaaccagcctggagtgcagtggcgccatctcagctcactgcaacctccgcctctcgggttcaagcggttctcctgcctcagcctcccgagtagctgggactacaggcgcgtgccaccaccacgaccagctaattttgtatttttagtagagacggggtttcaccgtgttagccaggatggtctcgatctcctgatctcgtgatctgcccgcctcggcctcccaaagtgccgggattacaggcgtgagccacagcgcccggcccatagtttgtatttttatagaacactctcgtttagaaataacttacttatgttcatttaatccttataatctctgttgccgagatgaagaaattgtgcctctcaaatggtgatttgaacaaaatctcacagctatcaaatccaaaggattgtttcaattcagtgtgtctaacttatcactcagtgttttcttccataactgaaaatagacttcatagtccaaaccaagctctctgctattgcgtttacaaagaaatgtgacgttccataaattgtgccgatctgagacctactgacttgtgtgaaacattttttctgagtatagttaccacaagaggtcgctgttgcaacgagttgcgtttaaagggtaacccatttattttcatttctgtacaaggtgttctagtatcttcaggtccctcataaaaacatctttgctccttcacttgttactgaggaaagcctggttatttatttcatgacctgtgatagctcctctgtcaaaatgttactagaagccatcaacactcactgatttttttttgcatgggaaaatggaaaaattgctgattcagaatgctttcggcaattctagacctagaagaggcacctcccaaatattttccagtgatttttttcattcctatattataagagaaaagaactcaaacaacataccactatcttttccatattaatgtgagtatgtaacaggttttgtttctagcatttggctgattcaatgagtactactgtgtcttttggattcaatgaatactactgtgtctttcggctcttttcctgaatggctttatttttcttttcagtttttgtgcttctgttataggatttatactaattatttcctgaaggaagtgtgtacagtaactacaaaaaattagatatataatcctacacgactgccttctactagccatggtactctgcgctctgaatcagatgagaagaaagggaaaggaactataatttactgttgactacgtgccacagattgaaaccctgaaatacatattattgttcccattttacagatgaagaaaccaagactcagaggagtgagctgcctgaggtcacaaggtggcagagttgagatttagatttagatctgtctgacacagcctgtgccttttcttcttgttcaccttacctcctccttggttaagtgagtgattccagaccaaatgtcctatcctagctggtcagcagggactaatgagaggtttgttcctctgtttaatatctgttacacagggtctgagaagaaggtattagttgtggacttagtgggattataaatgatcccagggaatcaggagatggaatgtccagtccagactgcctcatttgctctttcttggaataggattaggaatccctgtttcttcttggctaaataggggtcagtggagcactgcagggcataaagtaacaagtcaggcaggttacacttagaccatgactgtcaatgagtccatgagtgtcagaccgactacagtacatgaccaccctctcgggctgtggaaagtaatgtaatggggaataggagcccaatgtaatctaccttctcatagctttgcctcatttggaccaaatctttaagggattagacctctgcaaagatctaaaatgaaattcaggctgctgtgcttcagtaccagcagttttcactccctactcttcttggggctttagctgaactttgaggggagccctgctctgaggagctgctgccctgctattggctgctgtactggggcagcctgagtgacagctgctggtgtgggccctggcagttgctgctgggctcattgcagctcagacacagcaaaagagcctagaacctgggtcctagtttgcacctagaatatgaggcaagtggcgagagtgatcgtgttcctgaccctgagtgagttattttgggatgaagaggaatgggatctgggcctgatgatgctggaaaggaatctggaactttgcctgctagcagttgctctttatccaagatgtagagggatagcttcagggttccatttttctccaggcagctcctgagcatttatgtgagatgtgtctcagggcagcaaagattttcggggtttctaatccctagggtctatccatgggagggagatagtaaacctgacacttctgtgtatgcctgggataaatatttttgtactgaaacataaatgagaagtaaattgtatgtacatgtatatggcagggaagtagagcgtggggatggatttgactgtgagagggaaccgtggggctactgagtgggaccgtctaacttaccttgctttcaggataggggctaggattgtgttttactcccataggtactttgagccttgctaagaccacccagcccatctccatggactcatatgaaggacaagaagtgaacataacctgtagccacaacaacattgctacaaatgattatatcacgtggtaccaacagtttcccagccaaggaccacgatttattattcaaggatacaagacaaaagttacaaacgaagtggcctccctgtttatccctgccgacagaaagtccagcactctgagcctgccccgggtttccctgagcgacactgctgtgtactactgcctcgtgggtgacacacagtgagacagatgggcctgcacctgtgccgttttcctctgtggggtgggagtcacagcctagaaagaagtccaaaagtgctttctaaaatttttattttcaaaaggtattagcaaatttatgtattcttctactatttgcaaaatcaatcttatttattttttaaataggtatttcacttatgtgatctaaaattaaaaaagtataaaagggcatacagcatgatgtcttccttccaccatggtccctgagtactcaattatcaaagtgaggtatctgtggtatttatactattgttgctaagttcactggtactcctcagtttgtgtgtatagatagacacacactacatatactttatatgcataccacgcacagtcaacatgggcaatatgcttcttagcttttgaaacatttagcctaagtatcaggttattatttatagctgcacacattttgaacatttctgtggccatttccaagtatctacatgctggtttccatgcgtcccctgagattagatctctcactctctctgttgcctgtctttctcttttcttttgtcccacttccctattgtggatggtatgtaatggaaaatggaggtgatggtagaggaggagatgggagagaatttgtttctgatttgcattgtagactatttttgaaacatttaaatcagaaatggattctggatcattattagtttttaaagttgggttctttgaggctccaaagagagaagaataacagaaaatttgctgaaaatcctgcttgggctcctgaggcttcattaggatcatggggtatgtttttgtttgtttgttttttgtgggatgttgtctctgattttgatcacaaggaaagcaatatttgataatttttttattgagaatgagaggatcaggctatgtggcaggaggaggtttccatctagttcatctgagggtttggtgggggagtagtattgtggaaagaaaacaaacatttgtagagtattcgagcctatacactcatctcctttgtctgacttctctacacagtgacgaggagctggcagaaagtgggagtcctggtccccaaatgtccaggatgcagccaactcttctctgaagtgctccactatttccagtacttcatgtggcacagacaatatcctcaaaaaagcctagggtttctgattttcatattctcaatggagaaaatgaggaaggaatatttacagttcatttgaataaagacaatgaatacacccctttgcacaaaacagacccaaaggctggcgactctgacacctacatctttgtgagaagctcagagtgattccaaagtccctggagagcctctgcccaaagccgcactccagtcataagagttgagagagtgggatagagggacatctctgtaatgttcctgcctacttatgaaaatcaatacccacgtatgagaggctgtgtgggattatctaaagaagatactatactattctgtagataattgatctggaaaaggtggaatattggattggaaaatttcaaaatgttttctacccacttggagttcatcccatgcctgctcttgggatcttggttggatgatgcctttggggtagtccagaggaaaagagctgtgctgtggagatggggagccgggttacggtccaggttgtttcaaggaggaactgactgtgaggaaacaacacaactagcttttgtttcaaggtctgcttttatgaacaggtatctgtatgttagccattttggaagaaagagttgaacagccactgagggatggtagaaggggcactctaattctagttgtactttatttttactacatgctctgggcagcaaaacagactggaaaaataatcagctctaaagccaggcattcctgggtttgaatctgagatctcctgctgtaaagagtttgaccttagtcaaatacttttggcatttgagctttaatactttgtctataaaatgagggtcataatactatttttccagggttcttctgtggttaaaagactatcactaagaatgtcctggtttaatcagcactcatcagattaatgctatctatatcctgcattatcattgctattaaacctcacctgccaacccaaaaagctgtttggaggatgacatcacatactgggtgttcagactcttcagaaactgaaaaagacctgagccaatacaagaacatttttttgggagttaaaactcttggtctgtgacaaaaagatcaataaattgatcaataaattgatctgctatttctctgtagaaagatcacatgatttttttaaacaaaatgatgtcccctcagaaggggagatgttgggaggggaaagggagatgcaaaattacttgttgggtacaatgtacactacttgggtgatgggtgcactaaaatccttgaactcaccactatagaattcatctatgtaaccaaaaaccacgtttacccctaaagctgtgaaatagaaaaaaattttaaaaatgaggccagggtcataccattatttttttctctgagagagaaacagccaaaattatttcatttggaactcattagtacatttactcagcaaatgtttattttgtattatgatgtgataggcaatgatgtaatggaggaagtaccttattctccaatatagataagttttctgcacaaacggaggttttattcttctgtgggcagacaacacaaacaaagaaaaaaatgatttccaaatataagtgacatttggaaaacaaaatagggtaatgtgaaggagaatcatggtggttatggaggtcatttagtggtgacatttgagctgaatcttgaatgacagaaaaatgacaaaaccatttaagacctggggtaagaaagagttttcaaatgcaacaatggtccttaggcagagcatgtttgctgcatttatgacagaagctggtgttccctgaatatagtgagaaggagagtggtaggaaataatgtcaaaaaggtagttatggacttgaaaatacaaagccttgtaaatcatggttagattcagattttattctacatgtattgggaagtatttgactacctaatttatattttagaaggatcactcttcgtgctctggggaatggctcatagggttggcatggggagagactagggcacaaagacagttagaatttgcaggggacccagtgagacctgatggaggtatagactaggtggtagaagtgggaatgaagaaacatggatgaattaacttatattttggaggtaaaaaatagatcttaatgatgatttgtatatggcagatggggaaaaaaagagagtcgatgatgacttttaagtttttggcttatgtagttacatggaagatgagatagggaattctgagagaggaaatatttttgattatagtaggcaggtaaaagtgtcatttcagatatgttaagttagagatgtctataaggcattcaactgtagttgttgaccagggagttccatattgagcctggagctaacagaggacatagctggcctatgggatagtgttcaagccacgcattgaatgagatcacttagggaaagagtgtggatggagaagaggttcttaacctgagcacttggactgtcagttgaggtttaatagcgaaggaaaaatcagcaaaggagatcgaagtctattagtgaattggaagggaagccaatagaatgtgctgtcacagaaggcaaaacaagaaaatgtttcaaggagtggtcaattgtgtctactatactacttctgggtttgggtgggagcttatagtgtgaaaagaagaattagtcagaagagacagatggaaaataacttcaactggaaaggattaatgatataatccattagtgttcttattcctgcatttaaaattttcatgaaattttatatattgactttttttcttaatggcttctggcgttggtatcacttaaaaaggcctttgttgccttgctattataaataaccttcaatttatatttcttctataattatgttagtagctttgttttcatacatggaaactttgtggacaatcataaacttatttttagaatatggagtggagcagcgacccagttttatttttccccaatatttattgagcgacgcatcctgtcttcactaatctgaaattgcgtatttctctaagaatttgggtctctgtcttgcctctatctgtcctctcattgctatttgtgcacatattccatactcatttaattacttgacaaattatttgataaattatttcagtagtattggacccagtttatgtactttcctgctttaatttggccattgttttctgctcagtgttaccgctaatcctccgggaaaactgcctagtacaaactgcattctctaatctggagagagaaagttaaacttctgtaggaaaaagttgcctcaagtcatagttgcgtttgctgaggggcagggaccactgaagtggctctcctgatctctcatgttacttgcaggcaaaggagaatttaccatgaaactcctcatttcagaggcattttccaaaatttctttagtgggaggtcctgtaatgctgcagttcccaacctttttcgcaccagggactagtttcatgggagacaatttttccacagaccaagggagtgaggatgatttcgggatgaaaccattagctcatcaggaattagttaggttctcataagaactaggcaacctagatccctctcatgcacagttcaccgtagggtttgcgcttctatgagaatctaatgccattgctgctctgacaggaggcagagctcaggtaggttttatgatcagaaaaatattaaacaaaatttaacagccttggaaaagttatttataaacattgcattttatttaagaggttgaatatatacattgttttgccattttgaatttattagcagtgtggcaaagttagcttaatttgctattagtaaaactgaaaaccatttgataagctcttagaattatgctaatttgtctgaacggtagtagaagctattttaattaaaaactgtagctatatagtttaatctatatagtttaaccctcataatttgatagaattgagatcataggtgttgtgaagtatgactaatgccctaatataaataaacaagtaataaactgtcataaacagtctcaatatactctgaattctttcttccaacagatttaatttgtatagacaatagtaatacattcggataaaaattccaaatttgatttcacttatacttgttgatgtttgtaatgagagagtctttctgcgtatgttaaaattcatatgttaataggtgttttaaggagcttgtaaaaagagatgactatggaaacacataattaccctaaattttcatctttcatttgaaaacaaatttctcttaaatttaggatttttaaacaacctattatctgtctttgatcaaatggaaatttaatatatgtaaataggcaccgatgtttgcaagtaaacggcataaagagtggtaaagtaagttatgtgagggatgttttttaagtaacaagaagaaaaaatgttatgatttgtcggtaatatgtataaaataacactgtgaatatttgggaaatacacaaatgagaaaaaaatttaaaaatgctgtttgaaggttccaaacagtgacaaaatataagaatatactgcgggagatatgtcacttggacagaaacacactgagtgaagtccctgtatggtgtatggcacatggaaatgaagctcaagcagaaagcagctgtcttattggatttaggagtcagagtttggagttcggtgctgacagagtagctgaaattcaaggggggatccaggaaaagaaggattcacagtgtgaggagttacaaaatcttacaaagccacacttagttaggaactcggcaaaaataacaaaaaacaaataacccggctgggtgcagtggctcatgcctgcaatcccagcacttcgggagaaccaggcaggtggattggttgagcccaggagttcgagaccagtctgggcaacatggtaacaccctgcctctactaaacatacaaaaattagccaggcatggtggtgtgtgcctgtattcccagctactcaggaggctgaggcagaaagtacaactgagcctgggaggtccaggctgcagtgagccatgatggtgccattgcatttcagcctggtgatataagaaaccctgtctccaaaaaaaaaaaaaaacaaaaaccaaatatatatatatataaaatttattcacattatatatattttatatataaataaattattcatgtcctttactcactttttaaaccccataaaaaaagtgagtaaaggacatgaataattgtttaaaagaagacatagaaatggcaacaagcatatgaaaaaaggcacagcatcaataatcgttagagaaatgcaaattaaaagtaatgagataccatcttacaccagtcagaatggctattattaaaaagtcaaaaaaataacagacattggcaaggatgcagagaaaagggaatgcttatataatgttggtgggaatgtaaattaggatgacctctgtggaaaacagtatggagatatctcaaagcaataagaatatagctactatttgatccagcaatctcactactgagtgttattcaaagaaaaggaaatcatatcaaaaagatacatacattcatatgtttatcacagaagtattcacaatagcaaagatatggaatcaacctaattgtgggataaagaaaatatagtatatagacacaatggaatactattcagccatacaaagaatgaaatcatgtcttttgcagcaacatagatagaactggaagccattatcttaagtgaaacaactcagaaacagaaaatactgtatgttcttacttataagtgggaactaaataacgtttacacatggacacagagagtgcataatagacactggagagtctgaagggtgggagagtgggaggggggtaagagatgagaaattacttaataggtacaatgtacattattcaggtgatggctatactaaaagcctagactttatattcatgtataagaaatgcacttgtagctcctaaatttatacaagttaaaaaaaataaaactatcccttggttgattcttgagctgtgcaggcataagacaagactctaagaaagtaagtagaaaacagcagccagatggctgagagaaaagattttagcagttaccctcaactagggcaatagaattttaaatgcaagtgctgccaagtgaaagaggttgggtaaaaacttaggctttctaatgaaaacccagaaggaccacgccctaaaaataagaacaatactctgggactaaagggtataccctacaaataggtctataccctagaacaaggacatttaacaataaattaatgctgtgagtgtatgttatcagcagagtcatacttcaaaaattataaagtatttttgttaggtggtttgttgactgaagggaaatgatatcagatggaatttatgacccaaggaagtaataaagaacattaaaaatagtaactatgtggaaacattaaaaagagattacttttctaagtttttcaaaatacagttgacaaatgcaaaaataataacaatgtattacaccgttaataacatatataaataaaatcaacagcaataacacaaaaaactgaaggggcataggattaaactgttgtaagattcttgcattatgtatgaagctgtataatattaattcaagagagaatctgatgaactgaggatgcatatgataatctgtagataaacaattaaaaaaccaaagcaaaaaggtttagctaatagccaatgggggaaatagaatgaacgagtatagaaacttctcaaataaatcaaaagaagggagaataaagggcatattaacaaagactagaggaaaaacatagaaaatggattatcattgtagattcaaaccaaataaaaataattacattaaatgtaaatagcataaacattccaaataaaagggagattttctcaaactagacaaaaagacacaattgtatgtcattcacaaaaaatgtactttaaagacaaagatgagttgaaagtaagaggcaacctatgccatgcaaatagcaaccataagaaagctatgtgtctttattaatattaaataatatttgaaaatgaggggtgttatgagataaaagcgttatttaataataaacagagggtcacttgatcaagaagagataatattctctaaatgtttatgtactgatagtagagttataaaatatatgaaaccaaattaacagaattaaaggagaaataggcaaatctgtaatcagagttggagactgtaaggctcctctctagtaattgatagaacaagaagacagaaagtcagtaaaaatatacaaggctggaacaatcaactagatctaattgacatttatagagcactatacccaccaagtgcactatatacattcttttcaagtacacacagaacgttcatcaaacagaccatatttttagatgtaaaacagtctcaatagatttgaaaggattagaatcctacagttttctcaccacaatataattaatttagaagtcagtaacaaggtatacagtagaaaatccccaaatatttgcaaattaagcaatatacttctaagtcacccattgagaaaagaagaaattgcaaggaaagttagaagatattttgaagtaaaaaatgataaaatatagcccgggcgcggtggctcatgcttgtaatcctggcactttgggaggctgagttgggcggatcacctgaggttgggagtttgagaccagcctgaccaacatggagaaaccccgtttctactaaaaatgcaaaattagccgggtgtggtggcacatgcctgtaatcccaactactcgggaggctgaggcaggagaatcgcttgaatctgggaggtgaaggttgcaggtgagccgagattgtaccattgcactccagcctgggcaacaagagtgaaactgtctcaaaaacaaacaaccaatcaaaacaaacaaaaaaccccttaaaatttcacagaaaaattctaggctcaggtagcttcaaaggtgagttgaatagaacatttaatgaagaattaattctaacccaacacaaaacagaaaatagaaggagggcagtccggccccatctgtagtcatccacattgaatcatcagcatcagcatcaccttggaatttgttagaaatgcagagtcttaggccaaactccagttctggtgattcaggattctcattgtagcacagttcctgaatttgtacattttgttaagcaatgtggtcctgaagtgaggaagtaaacagaatgatgaagggaggtgggaaaaatatttttttcaagttctagtttttttttaaaaactagttaattgttttattttgttgagactctaaacttaccttagattcaatttttttaaatttgtgagtgagattgggctagaacagtggttcccctgtgggagcaattttatccttcaggggatattttggaatatctggagatattttttattgtcgtacagagagttgaaactggcatttagtggagagaggtcagagatgctctaaacatcctaaaatggacaggagagcttccaaccaagaattattttgtacaaatgttagtgctaatattgacaaactgtggactacagaatcctaagggtcctaatagctctgaaactctgggatccaatttaactgaaaaaacattcactgaatactgtgtgccaagttattatggtcttacattggtgtgccagcggggagacactgtcccatagcatgggcatacactatctggcccctaaccatgtataagaccattgatctatgccaaccagacaatacatgttcagaattttgaaaagaataggaaagctagggtcagccactctcatactacaaggaaatcagtaattcactctctgacataagtaagagtaggccaaggactgtttataactaacctcatcactcaggtgtactttctatttcatattattaataacaaattatactcattatcctgtatttataaatataatgtgcatcacatacagagtgaaagaaaaaatgaccaagggaaagaaaaagtagataaattgggagcaaaatgaacattgcttatgcatattgaaatccatgtcagtactagaaaataaagctattccatgccattgtttttgacaataaggcaacattttatgaaaaaatcataggggtagaaatttttccagaccataattgtgagtagagttatagtaaataggtggaacagaagcagaccacctaacgactagtattttcaactctgcatgctatatatccgaaggacagatattgacctaaactgttaagaaaagttcaaggaaaatgcaactaagaaatatgataaaggatctgggaattatatgatatgatgaatgagtaaaaggataaaacaatttaaatgaaaactttaaataaatacatttgatgtatataaatctaaatacattttgtaatatgtacatatctttgtattttaggaaagtgattctgtataatcacacttgagatatattagttatgccatgcagatgaggaattagattaattttctacattgcttggagatctactaagtcaaagcacagggaagggactccaacttgtgaaaaacagtcagaccaagtttccctggacggagagtaaatttgccattgtcagtttcctacatatattatgctactaacaggcattggttttatgcttacttatatttattattacaggaatgaatcagaaagactaaagaaattaaaatagatgatgtagggtttggatagaaaatttaaaatactgaaggactttatcacaggggaatatccaaacaatgattttagcaatagacaataaaatcgagggaaaagtttttgggtctgaaatctgagttagcagtgcccagggtaacaggaggggaaattccactacagatcattcattattcagtgatcacatttgaggacaagccactcattctgacaataggaataagaatacacttggaaaaggtgtacatttgtttacattatctcaatctgtagtctgatgtttcctgagatgtttcctcttttatgtcaatactttgcaataagtaagccacatatccgtaatttcagatgatctgttcttccagaggaaaatatttcagagtgcatgtcagatttttcatcacaatctataggctaaactctttcctttcattagaccaatattattaactcatggaagcctttctccctccttttatcttttattgtataatttagtcattttgaagaaaacaacactcatgttttgacctctggcactgtcaatttcctgggaatggcaagaacaggaacaaggccaggcttggaggagcagagcctgagatagcatgcatctgatatatttagtgaacctgtcttactccaatttttgtgcttaaatgctagcttcagaaagagttttcctctgtgagtgctgaaacaggatggctaatttggctgattgattttctggccaattcaaaaaatagtagagggataaggaggaaacgttttatacctcagtagctttgtagactgaatcatggcattttcttaatttcaagaagactgtcattaataaacacgaaaaacctctaacttcttcaaatatatttaacgtgactcagtagtgtgccgagaagatgcaatggaattctaaaacctacgtttgcactttttctgtctgctaatccacataatttctgactggaggtacacttggaatttactttatttggccttctgctgtttgatgtgccagaatctcccacagatacaggataattggtttagcgtttggggatctggccacaaggtggcagagcttctctgctcatgtagaatgtacgaaaggatccttttggttgacttctgtgagtaggctgacggcagaagcagatgcctctgtggacagtttaagaaaccacagtgctttggaggaaaggaagagatacttgataatatagctctcttggctggagattgcaggtcccagtggggagaacaatgaagacatttgctggattttcgttcctgtttttgtggctgcagctggactgtgagtcgagagcttttggggaacagagggtttagtaaatactcattagaagtctgaggaggagactcatctggtcttttccagaatgtctgaagttactacagtgaaaaaaataaaaaagcaaactccagagaatgatggcctgatgatcttgtctgacttttccttttgcacaggtatgagtagaggagaggatgtggagcagagtcttttcctgagtgtccgagagggagacagctccgttataaactgcacttacacagacagctcctccacctacttatactggtataagcaagaacctggagcaggtctccagttgctgacgtatattttttcaaatatggacatgaaacaagaccaaagactcactgttctattgaataaaaaggataaacatctgtctctgcgcattgcagacacccagactggggactcagctatctacttctgtgcagagagtacacattgcttctcaggcacctgtatcctgtacccaaacctgcacctgggactaaagccacactctatttcctttacctttaagtcagggattttgctgtaaggtatttttaatgtacggacattacaaaacatcctaaaaggtcagtttcaaaatgacttaatgattttcagaacattttgattaaactctttttgggagttaatgatttcttagttgatatcctggtcttagggttgactttatgggtgccataaagtcatctgaatgatttctcccctaccaaggacatcttggtgtcagagaatcctctccttgatggagtcttttatcttttaacattagtatttattaactttttctaactataaatatattaagtgcacggtataggaaaaaacaggaaattataaaatagaaaatcaaaatgtcttataatcctatcatacacataattcatagctaacatttagtattccttcttcattaaaaaaaaaattaggatcgcttttcctgtggcagcagctggggtgagaagagcagtggctctctcctctctctgccatggcatgtgcttgcccactgatgtcagcgtactctgagaagggagagtcatctggcaaaaatgtcactttgtctgccatattcaaggctcctattcgaccagatattgtgaactttgttcacgccaacttgtgcaaaaacaacagacagccctatgctgtcagtgaatcagcaggtcatcaaaccagtgttgagtcttggagtactggcagagctgcagcttgaattcccagagttcgaagtggtgggactcaccattctggccagggagcttttggaaacatgtgtcgtggaggctgaatgtttgcaccaaccaaaacctggctccattggcatagtagagtgaatacaaccccaaaacgatatgtcatctcttctgccctggctgcctcagccttaccagcactggttatgtctaagggtcatcgtattgaggaagctcctgaacttcctttggtagtcgaagataaagttgaaggctacaagaagaccaaggaggctgttttgcttcttaagaaacttaaagcctggaatgatatcgagaaggtctatgtctctcagcaaatgagatccagcaagagcaaaacgagaaaccatcaccgtatccggcgcaggggcgccgcatcatctgtaatgaggataatggtatcgtcaaggccttcagaaacatccctggaattactatgcttaatataagcaaactgaacattttgaaacttgctcctggtgggcatgtgggacatttctgcatttggactcaaagtgctttctggaagttagatgaattttctggcacttggcataaagctgcttccctcaagagtaactacaatcttcccatgcacaagatgatcaatacagaccttagcagcatcttaaaaagcccagagatccagtgagcccttcgagcaccttgcaagaagattcatcgcagagtcctaaagaacccactgaaaaatctgagaatgatgttgaagctaaacccatacacacagatcatgcgccggaacaccattcttcgctaggccaggaatcacaaactctgggtggataaggcagcagccggcagcagcagcactagaagccagatcagatgagaagggggttgtaggcaagaagcctgtggtatgtaagaaaggaaagaaggccattgttgatgttaagaagcagaagaagcctctggtgggagaaaaggcagcagctaccaagaaaccagcagctgaaaagaagccggcaaaaaagaaatctactacggaggaaaaggagcctgctgcataaactcttaaatttgattattccataaaagtcaaatcattttgaacagcttcttttgaataaagacctaatcaaagaggcagtgaggaaaaaaaattaggatcactcagacttgtattttaatttaatagtatattctaaccttaatgtttcacatttccccaatcttataaaaataaatttttaaatgattttgtgagtgattttataagccagcattttatttccactataatcgtcccatatatctgtggtgaaagacagtatttttctgaactcaggtgttaccctttaaatagtttcttacatgtaggaagttttaaattttctagaaatttattttttcttctgttctagaaataatttgtttcttcaatcacttatgctcttttcctcttgttctttcttcctccttgaagtgctgaatgttttcatttgtcccattttttttctatttttcacagcattttaaagggaaagttatatgtttctaacattgtatgttaaggtttctttcagcactgatgatactgggatttattaaatcttccaggagcagataaggaggtcagggttgatttagaattatttgccaagccagaagtcaggatgtcttttgctagtacgaatggtacatcacttatatttagatgccagttggagaacttgctggagaggtccatagtgatatccacttctgtgcctgaattgcttttatattaccatctctttgtatgattgtatcattctaacagggagagtagtttggtgacctatgttcagtggtttggttccttaaaaatgacaacgatgctatttggtattcctctaatggcatgcaaacaaaccatagtttctttttgtttttgttttttttttttttgagatggagtctcgctctgtcgctcagtggcacaatcttggctcactgcaagctctgactcttgggtttatgccattctcctgcctcagccttctgagtagctgggactacaggcgcccaccatcaggcccggctaattttttctattttttggtagagacggggtttcaccgtgttagccaggatggtcgcgatctcctgacctcatgatccacccgcctcggcctcccaaagtgctgggattacaggcgtgagccaccgcgcctggccgtttgtttctaagattaaaaattttgtttaaaaacagatgtttactttctgaaatgccttatagagatagttggtgtttagtttttcactttgtactcgttatcatcatcatcatcaccatcatcatcaagtggaagctaattcttcctcatataattcatgatcagaattaccctttattattttactctttgatctctttctactccccaggacccctgccactgctttataagtgttagtctaattgctcatttgtccttagagctgtctcaggtgagcttttatcatgtaggcagtaacacatgggttgattggactatccttcaagtctatcttctttataatatgtttaaaaagttgctcagtttttagggctatgacttgtgccactccttgcatctggcacttgtgtgtatttcaccgtttttaatgttttaccaatggacatttaaggaaaggggctaggtaaaatgcactgaatacacagatccatcaatatgtttgaaataatgcatgtgaagcacctagcatgatcctggcatgtactcatcattatttaataccaaatgggtactgacatatcagcagacttcatcctcaatatggatgtagctagataaaaaccaacagaatgtagctttctcttatttctggctcggtgtttcactttttctggtatcatgatgcccactaaattgaacatgtccaaaactagaatatgtcttttaaattttatttatttatttacttatttattttgagatggagttttgctctgttgcccaggctgcagtgtaatggtgtgatcttggctcactgcaacctccgcctcctgggttcaagcgattctccttcctcagtcttctgagtagctgggattgcaggtgcctgccaccatgcctggctaattttgtatttttggtagagacagggtttctccatgttggccaggctggtcttgaactcctgacctcaagtgattcacctgcctcggcttcccaaagtattgggattacagttgtgagccactttgcctggccaatatctgtctttttaaaaataagttttttgatatagacttggcaagatggctgaataggaacagctgtggtctgtagctcctagcaagattgacacagaaggtgggtgatttctgcatttccaactgaggtacctggttcatctcactgggactggtcagacagtgggtgcagcccacagagggcgagccaaagcagggtggggtgttgcctcatctgggaagcagaaggggtcagggaactcctttccttagccaagatagccatgagggactgtgccgtgaggaatggtgcactccagcccagatactgcacttttcccatggtattcacaacccacagacccacaggagatttcctccggtgcctatgccaccagagccctgggtttcaagcacaaaactgggtggctgtttgggcagacactgagctagcttcagaattttttttcatacgctagtggtgcctgaaacgccagcaagacagaaccattcactcccctggaaagggggctgaagccagggagccaagtggtctggcttagcgggtcccaaccccacagagcccagcaagctaagattcactggcttgaaattctcgctgctagcacagcaatctgagttcgacctgggacactcgagcttggtggggagacgggcgtctgccattgctgaggcttgagtaggcggttttacccttacagtgtaaagaaagccactgggaagttcaaacttggcagagcccaccacagcccagaaaggctgctgtggccagactgcctctctagattcctcctctctggcagaccatctctgaaaaaaaaagcagcagccccagtcaggggcttatagataaaacccccatctccctgggacagagcacctggggaaggggtggatgtgggggcagcttcagcagacttaaatgtccctgtctgatagctctgaagagagcagtggatctcccagcacagtgttcgagctctgcaaagggtcaggctgtctcctcaaatgggtccctgaccccgtgtctcctgactgggaaaacctcccagttggggccaacagacacctcatacaggagagctctggctggcatatggcaggtgccctctgggacaaagcttccagaggaaggaacaggcagcaatctttgctgttctgcagcctctgctggtgatacccaggcaaacagggtcaggagtggacctccagcaaactccagcagacccggagcagagaagcctgagtgttagaaggaaaactaatgaacagaagggaatagcatcaacatcaacaaaaaggaagtccacttacagacccctatctgaaggtcaccaacatcaaagaccaaaggtagataaatacacaaagatggggagaaactggcataaaaagtctgaaattcaaaaaaccagaacgcctcttgtcttccaaaggatcccaactccttgccagcaaggcaacaaagctggacaatgagttttacaaattgacagaagtaggcttcaaaaggtgggtaaaaacaaactcctctgagctaaaggggtatgttataacccaatacaaagaagctaagaatgttgaaaacacgttaggtgaattgctaaatagaataaccagtttagagaagaacataaatgacctgatggagatgaaaaacacagaatgagaacttcgtgaagcaaacacaagtatcaatagccaaatcaatcaaggagaagaaaggatatcagagattgaagataaacttaatgaaataaagtgagaagacaaaattagagaaaaaagaatgaaaaggaacaaacaaagcctccaagaaatatgggactatgtgaaaagaccaaatttacgtttgattggaatacctgaaagtgatgggaagaatggaaccaagttggaaaactcttcaggatattatccaggagaacttccacaacctagaaagacaggccaacattcaaattaaggaaatacagagaacaccacaaacatactcctcgagaagagcaaccccaagacacataatcatgagattcaccaaggtcaaaatgaaggaaaaaatgttaagggcagccagagagaaaggtcgggttacccacaaagggaagcccatcagacaaacagcagatctctctgcagaaaccctacaagccagaagagagtggggccaatattcaacattctttttttttttcatcatttcagctttattttatattacatcaaaattatgtttttgaaactttatggagaccataaaacattcgctttcaaaaaattacccttgttgcctatagtgtcttctccataggcatattctacatgtgttttatgatttttttttattttattattattattttttattatgctttaagttttagggcacatgtgcacaacgtgcaggtttgttacatatgtatacatgtgccatgttggtgtgctgcacccattaactcatcatttagcattaggtatatctcctaatgctatccctcccccctccccccaccccacaacagtccccggtgtgtgatgttccccttcctgtgtccatgtgttctcattgttcaattcccacctatgagtgagaacatgcagtgtttggttttttgtccttgcgatagtttgctgagaatgatggtttccagcttcatccatgtccctacaaaggacatgaactcatcattttttatggctttttaatgatcaccattctaactggtgtgagatggtatctcattgtggttttgatttgcatttctctgatggccagtgatgatgagcactttttcatgtgtcttttggctgcataaatgtcttcttttgagaagtgtctgttcatatcctttgcccactttttgatggagttgtttgtttttttcttgtaaatttgttggagttcattgtagattctggatattagccctttgtcagatgagtagattgcaaaaattttctcccattctgtaggttgccggttcactctgatggtagtttcttttgctgtacagaagctctttagtttaattagaatcccatttgtcaattttagcttttgttgccattgcttttggtgttttagacatgaagtccttgcccatgcctatggcctgaatggtattgcctaggttttcttctagggtttttatggttttaggtctaacatttaagtctttaatccatcttgaattaatttttgtataaggtgtaaggaagggatccagtttcagctttctacatagctttctacagctagccagttttcccagccccatttattaaacagggaatcctttccccatttcttgtttttgtcaggtttgtcaaagatcagatagttgtagatatgtggcattatttctgagggctctgttctgttccattggtctatatctctgttttggtgccagtactgtgctgttttggttactgtaaccttgtagtatagtttgaagtcaggtagcctgatgcctccagttttgttcttttggcttaggattgacttggcaatgcaggctcttttttggttccatatgaactttaaagtagttttttccaattctgtgaagaaaatcattggtagcttgatggggatggcattgaatctataaattaccttgggcagtatggccattttcatgatattgattcttcctacccatgagcatggaatgttcttccatttgtttgtatcctcttttatttcattgagcagtggtttgtagttctccttgcagaggtccttcacatcccttgtaagttggattccgaggtattttattctctttgaagcaattgtgaatgggagttcactcatgatttggctctctgtttgtctgttattggtgtataagaatggttgtgttttttgtacattgattttgtatcctgagactttgctgaagtagcttatcagcttaaggagatcttgggctgagatgatggggttttctaaatatacaatcatgtcatctgcaaacagggacaatttgacttcctcttttcctaattgaataccctttatttccttctcctgcctgattgccctggccagaacttccaacactatgttgaataggagtggtgagagagggcatccctgtcttgtgccagttttcaaagggaatgcttccagtgtttgcccattcagtatgatattggctgtgggtttgtcatagatagcttttattattttgagatccatcccatcaatacctaatttgttgagagtttttagcgtgaagtgttgttgaattttgtcgaaggccttttctgcatctattgagttaatcatgtggtttttgtcattggttctgtttatatgctggattacgtttattgacttgcatatgttgaaccagccttgcatcccagggatgaagcccacttgatcatggtggataagctttttaatgtgctgctggattcagtttgccagtattttattgaggatttttgcatcgatgttcatcagggatattggtctaaaattctcttttttttgttgtgtctctgccaggctctggtatcaggatgatactagcctcataaaatgagttagggaggattccctctttttctattgattggaatagtttcagaaggaatggtaccagctcctgtttgtacctctggtagaatttggctgtgaatccatctggtcctggacttctttggttggtaggctcttaattattgcctcaatttgagagcctgttattggtctattcagggattcaacttcttcctggtttagtcttgggagggtgtatatgtcgaggaatttatccatttcttctagattttctagtttatttgcgtagaggtgtttatagtattctctgatggtagtttgtatctctgtgggatggaaggtgatatcccctttatccttttttattgcctctatttgattcttctctcttttcttctttattagtcttgctagcggtctatcagttgtgttgatcttttcaaaaaaacagctcctggattcattgactttttgaagggttttttgtgtctctatctccttcagttttgctctgatcttagttatttcttgccttctgctagcttttgaatgtgtttgctcttgcttctctggttcttttaattttgatgttagggtgtcaattttagatctttcctgctttctcttatgggcatttagtgctataaatttccctctacacactgctttaaatgtgtcccagagattctggtatgttgtgtatttgttctcgttggtttcaaagaacatctttatttctgccttcatttcgttatataaccagtagtcattcaggagcaggttgttcagtttccatgtagttgagtggttttgagtgagtttcttaatcctgagttctagtttgattgcactgtggtctgagagacagtttgttataatttctgttcttttacatttactgaggagtgctttacttccaactatgtggtcaattttggaataggtgtggtgtggtgctgagaagaatgtctcctgttgatttggggtggagagttctgtagatgtctattaggtccacttggtgcagagctgagttcaattcctggatatccttgttaactttctgtctcgttgatctgtctaatgttgacagtggggtgttaaagtctcccattattatggtgtgggagtctaagtctctttgtaggtctcaaggacttgctttatgaatctgggtgctcctgtattggctgcatatatttttaggatagttagctcttcctgtggaattgatccctttaccattatgtaatggccttctttgtctcttttgatctttgttggtttaaagtctgttttatcagagtctaggattgcaatccctgcattttcttgttttccatttgcttggtagatcttcctccatctctttattttgagcctatgtgtgtctctgcatgtgagatgggtttcctgagtacagcacactgatgggtcttgactctttatccaatttgctagtctgtgtcttttaattggagcatttagcacatttacatttaaggttaatattgttatgtgtgaatttgatcctgtcattatgatgttagctggttattttgctcgttagttgatgtagcttcttcctagccttgatgatctggcaacagagccagaccctgtctcaaaaaaaaaaaaaagtaaaacagtaataaataaatagatacatatacagaagatacaaggagacaacttgcacgaggaaaagccacatggttcacaaacatatgggaaatgtttaaacctactggtattcacaaaagtgaaagcaaataacttaaaaaacctatcaaggaagaggaccaaataggaacagctctggtctacagctcccagcgagattgatgcagaaggtgggtgatttttgcatttccaactgaggtacctggttcatctcactgggactggttggacagtgggtacagcccatggagagtgagccaaagctggatgaggcatcgcctcacctgggaagtgcaaggggtcatgggagatttccctttcctagccaaggtaagctatgacagactgtacctggagaaatggtacactcctgaccaaatactgctcttttcccacagtcttagcaaccagcagaccaggagataccctcccatgcctggctcagtgggtcccatgaccacagagccttgcttactgctagcatagcagtctgagattgacctgcgatgctgcggcttgatggggggacgggagtctgcccttgctgaggcttgagtagctcacagtgtaaaccaagctgccgggaagcatgaactgggcagagcccaccacagctcagcaaggcctactacctctacagattctacctctaggggcggggcatagtagaacaaaaggcagcagacagcttctgcagacttaaacgtccctgtctgacagctctgaagagagcagtggttctctcagcatggcatttgtgctccaagaatggacatatggcctcttcaagcaggcccctgacctccatgtagcctgactgggaaacccctcacagtaggggctgagagagtcctcaaacaggctaatacccctctgggacgaagcttccagaggaaggatcaggcagcaatatttgttgttctgcagcctctgctggtgatacccaggaaaacaggatctggagtggacctccagcaaactccaaaagacctgaagctgaagggtctgactgttagaaggaaaactaacaaacagaaaggaatagcatcaacatcaacaaaaaggacatccacaccaaaaccccatctgtaggtcaccaacatcaaagaccaaaggtagataaaaccacaaagatggggagaaaccagagcagaaaagctgaaaattctaaaaaacagagcacctcttctcctccaaaggattgtagctcctcgccagcaagggagcaaaactggacagagaatgagtttgactagatgacagaagcaggcttcagaagatctgtaataacaaacttctttgagtgaaaggagcatgtcctagtccatcacaaggaagctaaaaaccttgaaaaaaggtttgatgaatggctaactagaatacacagtgtagagaggaccttaaatgacctgacggagctcaaaaccatggcacaagaacttcatgatgcacgcacaagcttcaatagccaattcaatcaagtggaagaaaggatatcagtgattgaagatcaaattaatgaaataaagcaagaagataaggttagagaaaaaagagtgaaaagaaatgaaaaaaggcttcaaaaaatatggactctgtgaaaagaccaaatatatgtttgactggggtaccggaaagtgacagggagaatggaaccaagttagaaaacactcttcagggtattatccggcagaacttccccaacctagcaaggcaggccaacattcaaagtcaagaaatacagagaacaccacaaagatactcctcgagaagagcaacgccaagacacataattgtcagattcaccaaggttgaaatgaaggaaaaagtgttaagggcagccagagagaaagtctgggttacccaaaaagggaagcccatcaaactaacagtggatctctctgcagaaaccctacaagccagaagagagtgggggccaatattcagcattcttaaagaaaagaattttcaacccagaatctcatatccagccaacctaatcttcataagtgaaggagaaataaaatcctttacagacaagcaaattctgagagattttattaccaccaggcctgccttacaagagctcctgaaggaagcaataaacatggaaaggaacaagcagtacaagccactgcagaaacatactaaatggtacagatcatcgacactatgaagaaactccatcaattaacgggcaaaataaccagctaacatcataatgacaggatcaaattcaaacataacaataataaccttaaatgtaaatgggctaaataccccagttaacagacacagactggcaaattggatagagtcaattccaatcagtgtgctgtattcaggagacccatctcacatgcaaagatgcacataggctcaaaataaaggaatggaggaagatctaccaagaaaatggaaggcaaaaaaaagcaggggttgcaatcctagtctctgataaaacagacttaaaccaacaaagatcaaaagagacaaaggaggccattacataacggtaaagggatccatgcaacaagaagagctaactatcctaaatatatatgcacccaacacaggagcacccagattcataaaacaaattcttagagtctaccaagagacgtagactcccacacagtaatagtgggagactttaacacctcaccgtcaatattagacagatcaatgagacagaaagttaacaaagatatccaggacttgatctcagctctggaccaagtggacctcatagacatctacagaactctacaccccaaatcaacagaatagacattcctctcagcaccacatcacacttattctaaaattgaccacataattggtagtaaaacactcctcagcaaatgtaaaagaacagaaattataacaaactgtctctcagaccacaacgcaatcaaattagaactcaggattaagaaactcactcaaaactgctcaactacaaggaaactgaacaacctgctcctgagtgactactgggtatataacgaaatgaaggcagaaataaagatgttctttgaaaccaacgagaacaaagacacaacataccagaatctctgggacacatttaaagcagtgtgtagagggaaatttatagcactaaatgcccataagagaaaacaggaaagatctaaaattgacaccctaacatcacaactaaaagaactagagaagcaagagcaaacacattcaaaagctagcggaaggcaagaaataactaagatcagagcaaaactgaaggagatagagacacaaaaaacccttgaaaaagtcaatgaatccaggagctggttttttgaaaagaacaacaaaattgatagactgttagcaagactaataaagaagaagagagagagaaatcaaacagacccaataaaaatgataaaggggatgtcaccactgatcccacagaaatacaaactaccatcagagaatactacaaacacctctacgcaaataaattagaaaatctagaagaaatggataaattcctggacacatacaccctcccaagactaaaccaagaagaagttgaatctctgaatagaccaataagaggttctgaaattgaggtaataattaatagcctacaaaccaaaaaaagtccaggaccagatggattcatatccaaattctaccagaggtacaaggtggagctggtaccattccttctgaaactatttcaatcaatagaaaaagagggaatcctccccagctcattttatgaggccagcatcaacctgacaccaaagcctggtagagacataacaaaaaagagaattttaggccaatatccctgatgaacattgtgcaaagatcctcaaaaaaatactggcaaaccaaatccagcagcacatcgaaaagcgtatccaccacgaccaagtcagcttcatcccagggatgcaagactggttcaacatacataaatcaataaacacaatccatcagataaacagaaccaaagacaaaaaccacatgattatctcaatagatgcagaaagggccttcaacaaaattcaacagcccttcatgctaaaaactctcaataactaggtattgatggaatgtacctcaaaataataagagctatttatgacaaacccacagccagtatcacactgaatgggcaaaaactggaagcgtacactttgaaaaccagcagaagacaaggatgccctctattaccactcctattcaacgtagaacactatgttggaagttctggctagggcaatcaggcaagagaaagaaataaaggatattcaaacaggaaaagaggaagtcaaattgtctctgtttgcagatgacatgattgtatatttagaaaaccccatcatctcagcccaaaatctccttaagctgataagctacttcagcaaagtctcaggatacaaaatcaatgttcaaaaatcacaagcactcctatacaccaataatagacaaacagagagtcaaatcatgagtgaacccccattcacaattactacaaagagaataaaatacctaggaatccaacttatgagggatgtgaaggacctcttcaaggagaactacaaaccactgctcaaggaaataaaggaggactcaaacaaatggaaaaacattccatgctcatggataggaaggatcaatatcgtgaaaattgctatactgcccaaagtaatttatagattcagtgctatccccatcaggctactactgacttttttcacagaattggaaaaagctactttaaatttcatatggaaccaaataagggccctcatagccaagacaatcctaagcaaaaagaacaaaactggaggcatcatgctacctgacttcaaactatattacaagcctactaaaacagtagtactaaactacagtttagtaactaaacagttagtacaagtaactaaaacagcatggtactggtaccaaaacagatatatagagcaatggaacacaacagaggcctcagaaataacactatacatctacaaccatctgatcttagacaaacctgagaaaaccaagcaatggggaaaggattccttatttaataaatggcactgggaaaactggctagccacatgtagaaagctgaaactgaatcccttccttacaccagatataaaaattaactcaagatggattaaagacttaaatgtaagacctaacaccaaaaaagccctagaagaaaacctaggcaataccattcaggacatagcatgttgtacgtgttgacataggacaagacttcatgactaaaacaccaaaagcaatggcaacaaaagccaaaattgacaaatgggatctaattaaactaaagagcttctgcacagcaaaagaagctatcatcagagtgaataggcaaactacagaataggagaaaaactttgcaatctatccatctgacaaaggactaatatccagaatctacaaggaacttaaagaagtttacaagaagaaaacaaacaaccccatcaaaaagtgggcaagggatatgaacagacacttctcaaaagaagacgtttatgcagccaacagatgcatgaaaaaatgcacatcatcactggccatcacagcaatgcaaatcaaaaccataatgagataccatctcacgccagttagaatggtgatcattaaaaagtcaggaaacatcagatgctggagaggatgtggaggaataggtacgtttttacactattggtgggagtgtaaattagttcaaccattgtggaagacagtgtggcgattcctcaaggatctaaaactagaaataccatttgacccagcgatcccattactgggtatatacccaaaggattgtaaatcatgctgctataaagacacatgcacacgtatgtttattgcggcactgttcacaatggcaaagatttggaaccaacctaaatgcccatcaatgatagactggattaagaaaatgtggcacatatacaccatggaatactatggagccataaaaaaggatgagttcatgtcctttgcaaggacatggatgaagctggaaaccatcattctcagcaaactaccacaaggacagaaaaccaaacaccgcgtgttctcactcataggtgggagttgaacaacgagaatacgtgaacacagggcagggaacatcagacactggggcctgttgtggggtgggggtctgggggagggatagcattaggagaaatacctaatgtaaatgacgagttgatgggtgcagcaaaccaacatggcacatatatacctatgtaacaaacctgcacgttgtgcacatgtaccctagaacctaaagtataattaaaaaaaggatcaaaagcttttttaaaaaaagaaagaaatacttgtatttgtatgcagtgttaaaaaaaaaacaaaaaaaattaggaaattatagaaatagcaaatcgaaagggagataatttggaaaaaatgcagtgaaacatactgctctggtgggagagtaaacttgtaagccattttaaaaagtaatttaaaaacatgacaataatctaaaaaatattcattttcttcattgtaatgattttctctagagaatctgtcttcaggaaaactctaaatgcatataataattatttacaaaggtatttggaaagttatgtacactaccccaaaatggaaaaccaaaatgtctcatctttaagggaaaggcttaatgacacaaatggaatattatgcaccaaataaatggtgtttacaaagataatctacaatgattattgaatagtaatgattattgaatagtaataattaaaaagaatcaagatatcgttgccacttaataaaaatctgaatagtgcaaatgttgggaaaaacgcactgagatattgataatgcatatctttgcttgataaggtaagtagtgattttctctttcatcctatttttatcagttttccaaaatatgccttagttgattaaaagtctttccaatccaccattttctgtaaattttgtaaaattactcttagctctgaagttcaatgaccctggttcagtcacctatacctcacaatgagaaagcagcaataacctcctgactggttttgcagccactattggattccttttcttatattaatagttcatatttattcagttcttactgtgtctgatgcattatataaagcattttatatacattagccaatgcattctagtgatatcccccattttacagataaggaaattcatacttagagacattaagtagcttgctctagctcactcagagattaaatggaggagtttcaaagccaggtttgtttgaggctggaatacaaactcttaactattctttcatgatgtctatcaacatacttctccaaattattcttgtagataagcagcctaattaatagaatgttaacagaatagaatgtccagtatatggacttccattttcataatattacctcctctaaagcctcaaaagttccttgtttgctaacaaataacctacaaatgaatcctggcattcaaaatcttttgttttctagacctgaattctccttccaacttgattttctgctacattctagcccattctctctttcttctatctgtccatccatctgttcagctgtcattgatctctccatggaatggcataaatgcatctaaggaagtgactacaatacatccatcctggcattaaaaagtagaaaagaaaggatttctgatatatataatcagagggctgctgtattttaaaaataattttaaacaccctctcagagggtattctaggggtaaaaaacccttcactcgtttgaattctcgctgaatttaaactgaatgtctacttattatagcccaacaagataaagaaaaaaggccttttgaagtcaaagcaatacttttttttcacctgtgggaaggcctattccctagatctgggaaagtttcctagaattcagccatacattttctgtgttttacattatctagagcacatgacatctgcaactgtggcaagaaggacagagtagttcaactgggcaatgaaatggagaacttggaaaacttgatcatttgacctgtatccagaattaatattgtcaattccatgttatgtactgagactcaattagcattcttctggacttgttacttacaagtgtggtctgagaaccaactgtatcagcatcaccagtaaacttgttaaaatgtggaatatccagccccacctcagacctaatgaaacagaattcacagcttaacaaaatccccaggtgatttgcatacataattaagttttagaagccctgacctgggagcacgttccattattataacaactttctgaacacaagagggcagtatttcctaccccctcagagcctgtctcagatgtgaaccgaagttcactgcatagctggattaggccagtatgtgtaaggggctgaacaggcttgccattgattggctggataggaaggccagaacttccttctaggggtagaagaaccccagtaacacctatcaaactaaacagaatggctttttggctgagaagcctgggtctacatttcaggccacatttggggagacgaatggagtcattcctgggaggtgttttgctgattttgtggcttcaagtggactgtgagttggagatttcctgttgatggagacagagagatccagggctgcagtgcacaggatgaaggggaggggctaggatccattcttccccatctttggttatatctggggttgtgggaggaaaatagactcaacagtgtcagtgtagtgactaaccctcctacttttggtgttgtgtttctgcctaggggtgaagagccaaaagatagaacagaattccgaggctctgaacattcaggagggtaaaacggccaccctgacctgcaactatacaaactattctccagcatacttacagtggtaccgacaagatccaggaagaggccctgttttcttgctactcatacgtgaaaatgagaaagaaaaaaggaaagaaagactgaaggtcacctttgataccacccttaaacagagtttgtttcatatcacagcctcccagcctgcagactcagctacctacctctgtgctctagacacacagtagtgccctggcagctgcttcctgcacccaaactctgctaactctcacaatcagagctcatggctgtgctgtctcccaaaggctaatcacagctcctgacagaatgggggggtgttagttgaaagggcaattttcaaaacaaacaaacaaatgctctgaagaattcctcagagaaaggagggaggacttgcttttaaaaaatgcataaattctgcttagtttttgtgactagcctagagcagcgtgataaatttatggagttaaacacattacacttaagcattaaaacatggattcttctagatgaaaaaataatccaaacatttttgagtcccttcccaaactgaacactgaataatgatgatgatgatgataatgataaaaaattgacctttttaaaaattgttcatcttatgaatggataaccatgctatattggaaaacatgccataagtcatggcattgcagagataaatttagagccgttgtttactatgtatgtggtatcagtgagtaggtcaatatacaagtcttctttttcatttgtttcttaagagacagggtcacactctgtcacccaggctggaggctggagtgcaatagcacaatcacagctcactgcagaccacaactcctgggcttaagtgatcctcctgcctcagcctcctgagtagctggaattacaagcacacaccaccatgcctgggttgtacaactcttttaagaaagagaacttacaccttctcatgttaggcatgggttctgagttgaggacttctccgttattattgcctgcattgccatttctatcaatttctgtcatctatgtattaccttatttcttgatctatttttagattattgccaaaacagacagatcccataggtcatgcatgttcagttactaacatggcagaatctgtgggttttgactaactctgttttaggctagggctgatatttctgtctgctttgggccacatacagtcactgccaaaatgatatgatcatgaagctgtttgtgtttgagtgtaggaagaggtgcagagagaatatatgtaggataataggggaagaaaacaatacacctagaaaaacagaatttgaggacaagaagtcccttcttttaatcaccattaataaaatagaggcagctaggaataagaaaataatgggctctgagtcactggcatctgggatttgatagtcagagagaaggagagttcaatgcagagattgttaaccatagttggacatcttgaaggttcataaactccctgaaattgagaatagatgaaatattattatgacataattattgtttgggaggagttttcctcccatttctggcaatgaacaagaaaagattcatataatttgaatatggataagagttatgtcagaacagggggctgagagaaggatgagggattgttcaacagctcaggccagagatgaggacagacctaagaaatgattgaatgtaggagaatttagaagggagtaaataattttctccaacaggaattggaatgtctttccctttgtaataaatggagggtataaattacaactggcagtacagcattcaaaagtatgggcgtgggagtgcaacatatcggtggaaaattctgacccagtcaatgactgggctgtgttgtcttggggaagtgtttctagatctctgagtaccaaattcctctcctgtgaaatgctagtaatagaattacctcataggattattgttaatatgtttatacatattaacataaacatatgtatatgtttatacataaaagtataaaaatatatataaggcaactattgtggtggcaggtacaccagtgcactagaaattcaacagacacttgtttatagttcatttctttcaggaagttaaaactcaaattttctgctctaagcattaaatatatctttttcatgttctatttctgtaatctttttactaatcacctcaaaatctatttgaaatgatttggtatgtaaatatataaatgatctgtgtttcacaaaccagagacattaacaaatattattgagtacctgctatgtgccagacactgctatatacagcagggatgcatcaatgaataaaatagacagaagttttggctctcctggagcttatattttattgaaaaaacagagtgaacaaaaaatgtgataagtaatatagtatgttagaagacagtaagtactatgggaaaagtagaccagggtaatggggatgggaaatgtggaggtggagctgtctgcagttggaattttaaatgtggggagggagtcatggtagttcttattgaataagtatgtgaagaaagtgggggaggaagtaatacagttatctaggagagcatgaaccaccttggcaaaattgtgacggtaagagaaatctgacatagctgactccattttgcttctaacctccaagctgtcctgttcattcctgggtgtaggccaagctgactttgggagaaatttagtttatagtttaaccttaaagcaaagatgataatagtccttccccaaacaaccccttccttggttgggggaccaaaactgcctttgtaaaactaacaaattagccgtaagattagaaattatgactcaggagttatgcaggcagaggtcaaaacattagtaacctccccacttgctcctatggatatcaactctatcataggacctaagattggtgttcaaggtatttttcagattctaaatcctgctggaccagctggtgccacctggactggtaaactggctcaactggttttgtgatcccatccaggaactgactcagcacaagaagatatcttcaactccctgtgatgtcatccccaacccaaccaaccagcatttgtcaatcactagccccctgcccaccaaattatccataaaaacccaaatttttgggtctccaaatttttgagtgctgtgggtgggggtctggattcttgattttgggctttgagtctattcctgatgacttttggcttggtaaaaagtcttgatttagagccagctcttttacatggtttaataaaataatccacgcattattattaatgcaaagattaattattaattaataatacatattattaatgcatagattattattagtgtacttctctgtatggaaaagaagtctgatctctttagggtactgttttaactcaaccgtgggtccttcttactggaaagatttctttctttagtacaccataatttattcattgttttcataagcatcattgcagaggaaacagagatttttgttttttaggaaagctgatccaaaatttagagattatgagtttattggaggtctatgattaaaataggattaccatacaaaatattttttaaggcaaaacaatctttcattttatttgtttgcacaggtgacaccattatccacatggaaccacaaggatttatgaaaattctggcatgtcttgccagttgttccaactgaaaactatcctatgcgtggaaatttgcttctacctcagagtctaaaatttaagctaagaatcttgagtatgctgtggtaaaatagaaagaataactacatttaagtaaatatcgagcaactatttgctttccttattttcctcccaactcttctggttttaataagattttctagttatttaaattgaactatttagttgatttaagttgaaccaacccaagaaacaggaaactagttaagtcaccacttgagcaaaagagaaagacgagaattaagttaggttgacaagtgtgagaagaaaaaagagaaaaagttttgttgatctttttaacctcttaaatatctcatatttgtctattttccaccgtcaccaccacctggaggaatgcagtagcctcctaattgttatgtctgtatttactttagcttttgcatttctgatctatttaatacattagcctgccaagatattttaaaaaatgtgaatttaatcctatcatctccctgcttaaaatactcttaagccttcctgttgtgtttatcaaaggccgaaatccttaccaaaacccctccatggtttgctccctacttcttctctagttaatttttactgcaatgcccttttcattcttttatgctcccatcccataggtcagtttttatttccttgaaagtgccagatatcccttaccttggagtcttccaagataccattttccctgcctggaattttccctcattctttccgtgagatcccaattcaattgtcttttggaaaaaccttctttgacacttcacccagttttcaaatagataaaatttctttatgtaagttctcaaaacaccttcctattagctattattagatgagtttgtgttccatgaaagcaggaactatgtttatcgttttcttagcattctattactagaaaactatgacctatggctcatctagacaatggagtcactgtgtctaaaactaatactaagataaagatggtggaaggtcatgaatgttctttttctaaataaagacctgtttttgatctccacccttggacttttccagttttgttttcatagctcttcatattgccaggctgtactactttttgaggagacggtttccatgtcgaattagctcccctgtgaaatgggtttctttccctttattctaacctggtcttcctgaagttctatagggaggctgtgtctaaccatcatgaaatttgatgagcctgtactctgatgattttacaggtccatcctgtgcttctcatgattttacaggttcctgtcccagctggtctatctttttattacagatgtgagtgtcttgatgtagaaatctctcttctctgctgtatgcttcctacccagcaacttttatttttattaactggaatgtgtctcactatgttgctgttttctaaatctgttaggagataagacattctgcttcagttggatgttgtttatcatgtattgtattacaataaaaacgtatgaaactttattatagtatataatgttattctggactacatgcatctatcaataaataattgttaggcatattctgtgctccaggcatcttactacatgctgttaaaatacagctcctgccttgaagcccttactggtcacacatcagaaactcttcttgttcctaaaatgacaaatcaaacaaacaagaataaaacaaacctcttttttgtatttctgtcttcacattgctatgtatttgtttcaaagaatgaaaattggtttctatctgaaactagtaattattaacatttgtttagtactgactacatgtaaagtatggggttaaaatttttacaaaacattgttacttaactttcatagcaatatctgagaagatttctttatcatgatgatgaaactattactggcactatataaaatattcataataagagccactgacttagccagcacaaaagttagatttgaaccgtgtctaccagatgcccaacgccaatatttaagcactatttactgctactagcctagagatctctgttttctgatgatgcagcttggacatgtatcattcctgtattcatttgaggaaaagaaacaaagtggaagctcaatagtaagtaagccaattatttgcagctgcctgtacctcagcacacagaagccagtcaatcagtgaaagtgttctttgatattgagttatataattactgaagagtcctgcttaaacagatgttgctgtgtaggcgctccagccatagcctggattttagtagatcctggagatacctgcaacaatagatcatggagacacctgttatgtacttaataagcatattttccaaattagaaaatggaacatatgatgtgataattgtaagtaaacacaatagacatatgcaggacactatatacagataggtatttcccagcatgtatttgtatttttaacaaacaatgttttgttgctgctgcttggcatcaatataggcaactgggcagatgttggcagtgagggggagaagggtaagtttaccagattcttcttagttggttattagaaatgaatgcactagttagtgtaaacaactttgctttcttatcatgagctgaaaaattttcaccttaggaactgactagagaatgtacaacattcagaagcctgaaggtacgtaactattagttctcaggcagtcttcaaagcccatcataaatagcatttgtcatcaaatcctcccatacattataatgtgctgtagctgaatacagttactggttgaattattgatcttgctaaaaattaaactttacctatttgtatttccaagtgtcattgttactcaaataaggaagagttagtaaaaaaaagttttgacaaatggcactcaaacaatttggtatgcttacatatagaaaaataaaccattatccttatcttacattgtacaccaaaataaagtcaaaatgggtcatagatctaaaggtaaaggaaaagctgtagacctagaagaaaacattggagaagttattcacaacttttgggtaataaaaatttcataggtatgacaccaaaatcataaaccacaatgaggaaaaatcatgtcttggacttcatcaaaattaaaaacttctgctctttcattaataaaatgaaaagacaagctttagactgggagaaatattctcatgctcttgatgcccatatctgacaaaggacttgttttcagatatctaaagaagccctacaccttaataataaaaagaaaaaaagatataagtagtcaaaagatctgaataaacagttcacaaaagaagatatgtaaatggcaaatgagtacatgaaaagatgctcacatcactggttatcagatgaatgcaaatcaaaagcatgagatacactacatactcacccaaatggtgaaaattaaaaaaacctataattctaagtattggctgggatgtggggtaacgaactctcatacttctctgtgatggttgggggacacagcagtgtatttctctgcacttattgaagccactgagagagaaatgatgaagatgggtctaggagaggcatgtctaaccccaggactctgcttgaaatgcccagctgcttctggagccaacaggaaaatcactacacagacaagaagtggctaggggtgtggcaacacagatgtggaggttacagagaaaacattcattgtaagaaaaacacctcctgtctgagcccaaagagcgcatctaccagatgtatcatttaccagaaacatctttacctgtgaatcttgacttgaaggtgagtttaaaatcactatcaattaacaattaaggttaacaattacaacaattggctgtgtcttaattaaactaaactggctaatgaattggctaatgagactcagaaatacgtgtctgaaaataagtaaaatagctgtgaattgttggatgttcaaattcactcattcaacaaatattttgagtgtctaccatgttccagaaattgttctaaatattaatgcatctctttgtttcttaaaaataaatactgtttcacaaataatttggttataggccagtgtgttaagtcacagggctttcccccatggagacctaaatgtctgcatttgtgtcagaacaatactttccaaatgatctagttccctggagtgtgcagatgacttgtgttaatggcttgtgatggtgaccccatctatcagaggtgtttgaaccagagcaactccatcttgaatgggggctgggtaaaatgaggctgagacttactgggctgcattctcagacagttaggcattctaagtcacaggaggtcagcacaagatacaggtcataaagaccttgctgataaaacagtttgaaataaagaagctggccaaaacccaccaaaaccaagatagctaagagagtgacctctggtcatcctcactgctgtgctcccaccgaaccatgacaggttagaaatgccatgacaacatcaggaagttaccctatacggtctaaaaaggggaggcatgaataatccactccttgtttagcatatactcaagaaataaccataaaaatgggccaccagcagtcctcagggctgctctgtctatggagtagccgttcttttatttctttactttcttgataaacttgctttcactttattctatggactcaccctgaattctttcttgtgcaagatccaagaaccctctcttaggggtctggatcgggacccctttctggtagcacatctgcactaaaatccgagtgtgcatcaggttagaatgaggattggaatatgtgggctatgttgtatgcagagtttaaattttactaaagactctcaaactgtgttgttttttttttttttttgcgactgagtctcgctgtgtcgcccaggctggagtgcatgtgcagtggggcgatctcggctcactgcaaactccgcctcccaggttcacgccattctccagcctcaggctccctagtagctgggactacaggggccacaacgcccggctattttattttttattttttagtagagatggggtttcaccgtgttagccaggatggtctcgatttcctgacctcgtgatccacccacctcggcctcccaaagtgctgggatttcaggcgtgacccaccgcccctggcctccaaactggtttttgaagtgttataactttgtgatttgactctcgagagtggtttctgagagtccgtttcaccacttccttgacagccttggtattgtcaaacttaaattttgttcgtcaacctgataagtgtaaatgctttaatttgcatttgattactagtgaagggtatcatctttttatatacttattagtcaaatgagttccttcttttctgaattcgctgctcttctatggagctttcactattctctacatgatttatgggcatttattataggttcttgaaaataatctagtgtaacctgtcttgataaatgtcttccatatatggcttgcttcttcgttttacctatggttattttgtatgcagatagttaaaattttaatgtagtcaaattactagtcttttcttttatagtttagtgtttagtatcaaagataacaatctttcttactatgaggccttaatacagtgttttccaatgttttcttctaattattttaaatttaatttttctcatttgggtatagtaatgttgtttttgaacaaagcttgaggaaaagttatattttatctctccccacaccaataaataatactaggtattcaacagtttaatctttctcccatattggttcttccgtctgtttcccagctaattatcttccactactgaaacaagatcttcctgagaactctacctaataatccgtgaattaggagtttttccagtttgactgctgggaacaggcaggattcttgttcccaagggagcaccaagtgggcagtgctccttgtaatcctcttggatgtttttttccgctggcctcaggtagttgtctcccatgcatgtgctggccagtattctgctgggtactcaagggagaccctacgcagatctctgcagttttttctcggtgcatctcttttccattgggtgccctatgatgtgaattctatctgccttgatctcccagatctgaactctgtttcaactcacagaactgaaaaagaagttaacccgagccccttccccatttattatgaaagacaggaatttttcatagaaacatttcaaagcgaatgttaaattagcattttaaaagttatattttaggcaaatttccagataaacaaactggttaagacacaattttttcacttctaattttgcatcaaaattaggttctcttttcaaaaaaattattttattttattaatttttttgagacagactctcactctgtcacccaggctcgagtgcagtggcaggatttttgctcactgcaacctccacctcctgggttctggtgattcttgtgcctcagcttcccaagtggctgggattacatgcatgtgccaccacgcccagctgatttttgtatttttagtagagatgggtttcatcatgttgcccaggctggtcttgaactcctggcctcaagtgatccgcctgccttgccctcccaaactgctggaattagaggtgtgagctactgcatctgaataaaagtagattctctagtcttcccaggacgtaatggatctgattggccctgtccaatcagtgctgctggtttccttccagtctgctcttagctttgtatttacgttctccattattttctggagaaagactatccaaaagccatatctaaagaactgccttttggggagatttgtaaaagctacagtgttgctaatctaaatcaaatgtaactattttataattacacataaagtagattaaatgaattataggcaaaaggaaaattatttgattcttagtggataaatggtatgcaaaaggatttatattcttagtacacggtactattcacagatctgtactgttactataaacacagctacacatgcttatctttctgctatttagaagaaattaaagaggaaagctggaagcatcaaatctgcatgatgtttttgggggatggagtagggaggttgtggctatcatgggtgcaaagttgagttggcaagagtcaaaggggacttctagttttaattttaattgatgttttttcaaagcatgccattgatgtcattcacataatattatttaaaatgatgtggataggctgggtgtggtgagcccatgcctgtaatcccagaattttgggaggccgaagtgggcagatcacttgaggccaggagttcaagaccagcctgggcaacatagtgaaactccgtcaaccctgtctctactaaaaatacaaaaattagccaggagtactggcacacgcctataattccaggttcttgggaggctgaggcacaacaattgcttaaaccctggaggtggagattgctgtgagctgagattgcacccctggactccagcctggtggagtgacacagtgagactctgtctccaaaaaaaaaaaaaaaaaaaaaaagatctggataaaatcaaatggattttgattttgtcaatagtggtatgatctgggttactctctataatataatttgttatagttaaaaaaaatttgtgcttgaaatcaagatacggttgaggctggggatatgaagccacttatcttttgattaattcgaagtttacagctctatgatacaatcatatgctgttgcctaaaaatataatactgacatcttaaatgtaagttttcctccaagatatttctttctcacactgcattcttgactgagtgactaaggtttgtcatcacattctcttacctctctctaaggattctgccatatttgctcccagcacccatgtatctgatcctgatggcagtggtggcctgtctggagcagctgttgcggggatgcccgctgcagtgggggaggtgcggccagggctttgcactctacagagctgaagggagccgggaacaggcaggaattccctgcctcctaccgagttggtagacggggagcgctgtgctcctgggtgcaactgcagctgcccagctgtggctccagacccaggaatccttgtgcttttgggggcctgggaagcctccctgcccccacaggctcagaagtgcctgctcccattccctggcctctcctcactcctggcacccactccgagtttggagcaaagttgtggccgagtctgggtgctgtcgcaacccggccggttgtacacgtgcttggagaagtactgtcacaccagccccttactgctgccttggccccctctggactttgggtactgttgaacatgggaaggaggcttggagtaggggccaagggaagcttggtgtgggcctacaggcacacctctgcgatggcctgaagcctgggggctgggctgccagttctgggtggagtccaccgcccagagtgggaacttaccgtgctttttctgggtccacacatggaccaatcagcacacacttttgaacccataaaaataggtttcgaacccataaaatgtcttttgaaaaatgtcttttgaacccataaaaaatgtcttttgaacccataaaaatcttgaactcggccagattcacacagatgtcgggactatcaactgcagaaaggagctacccactttgggtctccctgacttgtcaggacaacctgcctgtggaaaggagctacccatttcaggtctcctgagcgctgttctgtcactcaatgaagctcctctctgccttactcaccctccatttgtccacgtatctcattcttcctggacgtgggataagacctcgggacctgctgaatgatgggactgaaagaactgtaacgcaaacagggctgaacaccaccccaaccccaacatcgcaccccctatgctcaccacgttgtgggaaatgaggagagagctgtggccctttaaggagcccagacctgggagctccctgagccagggctgtgacacccagtttggggctctgcagttccaggcatctccaagcttctgggtgccactgcattccctggtgcccattgtggaagctgcttgtggtatgcctggtccagcttcagcctggcagggagccagggcctgtgctggcacctggagctgcccaccccaccacagccggcatacctggctgtgcgcaatggccggacccttcactaactcacatacccctttccactccgtgcctggcttacccttggcagctgtggtatctgggccagtagcatgagctgaatgtagcctgctgggctgagtaggtggaacgagcccagtgggcccaagcaaaacttgggcaaagatgccactggacacagaggtttcgagctggaaaagtgacaccctaagtgtcctgtgacaatcctacagaaaagttgtattgctttctagagtacatttccaaatacgtattcctaacattcactttgatatggctacgggaggccttgcattgtgtgttattttctttttcttttttttttttttttaagatggagtttcgctctgtcatccaggatggagtgcagtggcacgatctcagcttactgcaaccttcgcctcccgggttcaagcaattctcctgcctcagcctcctgagtagctgggactacaggtgcatgctgccatacccagctaagtgttgtatttttagtagagacggggtttcgctatgttggcctggcttgtcttgaacttctgacctcatgatccacctgcctcggcctcccaaagtgctgggattacaggcgtgagccaccacgtctggccactgtgtgttatttggaacctccgtgtacctatgttagctttccttggctttatcagttgagattgttgcattttgaagagaacatatatccagttcttctgttttgcccatctgctccataatcactggtgatagttttgctctgagatagatcaggcctcaatgaacagattagtaaaagaaaaacacaggagaaagtcatgatgatcacattatagaggcttataaaataagaacaattcctccaatttagaagttggaggaatttttgcacgtggtgttagcagatgtgcacagcgttaacatttctttaataattttgcttatagccacaaggtgacaggggttctctttcatttgtaaactatgtctttcttatacctaggaagtatgtttacgttagaagagcatattgctgattggttgacagacagacaggctgtttcatttattagattaaaagaaacaaacaataaaagctttgtttggctacataattttatgcagcatttttggtatcaagacaaagtatcaggatggagaagatgcggagacctgtcctaattatattttgtctatgtcttggctgtaagttgagggttctaagaactggggaccccaggagacatttattcaagtccttttggggagatggggatgtagtctggacttacttgtcattgcttgtttgagattaagaaataaaattatgaaaggtctaaattaaaatgtacatattgtacctgatgtctttctgaataggggcaaatggagaaaaccaggtggagcacagccctcattttctgggaccccagcagggagacgttgcctccatgagctgcacgtactctgtcagtcgttttaacaatttgcagtggtacaggcaaaatacagggatgggtcccaaacacctattatccatgtattcagctggatatgagaagcagaaaggaagactaaatgctacattactgaagaatggaagcagcttgtacattacagccgtgcagcctgaagattcagccacctatttctgtgctgtagatgcacagtactccctaggcacctgcaacctgtatccaaacatgcagctgggtagaagtaccataacagaagcatcagcaataggggccctgagcctgagtagacgtgaagaactaaggcatgagtatgaccagagaggggaggagataaagggtgctgttcatttgactcatgtatcttttatcaggccacccttcacaaagaccgtctttgtgccttatttgaattgatcaatcctgacccttcctatcttcagcagaatcctttagtgcccaggtcagtcttctagcatagagagcacttgttctcttctcaggcctggtggaaacacatgtcaaagaaatttgaagactgttgtttttctactgtaaaatctgacaaaggaactacaatggttggaatcatatgtgaaaaatgctgtagcagtggttttcatttactcacccactgaacaagtatctctcagctcctgatatgtgccaggtactctttagtcattgggatgcattggtattgaacatagcagataagccatcatagagctcatgtttcctaagtttctgggatacacaaaggggaaaccaagtctgcctaggatttagaggttcccgagaaattgcagcaagagtttagtttcatcttcatcaatcatttttctcatggaaacatggttaaagattggggacagctgaatgctgcttgaatctgtgggtcaagaattggcttcacatgttgaggtattgtctgccagagttgaggagaaatgccaggtggttttcggtatcatctggccatttccaaacaagtctggaaagtgaagtgctacaggctgtcataaataaaacaaatctataaagcctgaccctttatttaatggaattgtggagttcaaataaaatatcaaatacgatgctattgatgaatagcactaaacattggacattattttaaataatttgtagagtagctttctgttactgtagattctagatgctcttttggggacccagctcaggacaggctaagtggaatttgtgaaaccatcagaaaggagaaaggagaagctcagtccactgagccaatgctgtaggagttctttatatccagaatacataacgaatggctccaactttatagtgccaattaaaaatatgtaaaagacttgaacaggcattttacaaggaagataaaggaatagccaataaacacatggaaatttgttctatgtcttaagtcataaaagaaatgtaaattaaaaccacgatgaaatattactttatacctatgtctaaaattaaaaagactgacaacatcaaaccctaggtttccagtggccttgctgtcctgaacaggtgcaaacagcccagagctggggaagtctacaggccctgaatatccaggaggaatagccattgccataaattgaaatgaatatgattctgggatcttgttaaaagtatacattaacttagggtaaaatatatgaattaacttagataaaatgacggcagtattatggcaagtcttcctatccaaaagtgtggtaggtttttaattcttttgtgatctccaggagagttgcaatatatccagaatatagaaagaacgactacaactttatagtaacgataaaaaacatgcaaaagacttgaatacgcattttacaaggaagacaaaggaacagtcaataaacaaatggaagtttgttctatgtcttaagtcataaaagaaatgtggccacgcacggtggctcatgcctgtaatcccagcactttgggaggccaaggcgggcagatcatgtggtcaagagattgagaccatcctggccaacatggtgaaaccctgtctctactgaaaatacaacaatcagttaggtgtggtggcgcacacctgtagtcccagctactcaggaggctaaggcaggagaatcacttgaacctgggaggcggaggttgcagtgagccgagattgcgccactgcactccagcctggtgatagagtgagactccatctcaaaaaaaaaaaaaaagtaaattaaatgagatatcacttcatactcatggctaaaattaaaaagactgacaacaccaaattttggtgagaatgtagagtccctagaacatgccttactcatataggtttaaatggatacagccacattggaaaatactcaccctatgatccagcaagtatcttttgaggcatttacccaagggaaatgtaaaaaaaaaaaaaatccactttcctgtacaggaatatttatagaagctttattcataatagttccaagttggaaacaactcgaatgttcatcaataagaaaatggagcaccaaattgtaatttattcatactcagcagtaaaaaatagactactgacatataccacattgtaaacgaatttaaaaattttagttgattgaaataagacaaacatggaacaataaaaagtgtatggttctttaaatataaagttcaagaacatgtaaaactaatatatgtgaatagaaattttaaaaagtgcttgtctgtgcagggtggagatccagtagaaggtggtgtagcattttctggggggtaatgaaagtgttctattactctattggggtgttgatttcaagagtatatacatttgtcaaaacttcagtgtacatttgagatcagtgcatttccctgtgtgtaaactctacctcaataaaaattatttaactaaaaaaccttattttgcaaggatttaaaacaatcaataaattgtatccttacattagcaatgaataagtaaaaaattagcaatgagaggcacacactcattcaataactgttttggatagacagcaaagtcactgacagtggcttttctttttgattcctgggatccttcagagactccatctctttgatgctgcagaaaactggggtcactggtggcaggtttcttgtggtaggtagatttcccatgagcacctgttttgatctgtgtttccctgcccttccaatggttgagaagcttctgatgctgtatgttaaatgccaagagagaattcagtttccctgactttaccctatttaatctaaatccttggattacaattgttgggtgctagaaatcagatgttcctaataaagcccactgttacttgggaaaataagcaatttgtgtccttgatcatatggttctgacatatttcactcaaacctactggtataattcctaagatatattctctacataaactcatagagaagaacaggatttcccccacagaaagagacagtgtggacatcaaaggaaactatgttaactcaaaaaggtgaagccattatgaaaatagagtctcttcaccttataggtgtgctgttcatataagctaaacggattacagacaaaggtccaaggaacaggggaagagggacacactggttctgaccttcatgaagataaggcacaaaggaggagggagaaggaaaagagtctcgatgcttcgacctaaacaaatccaggagagtggattctgcaggaaatatactactttcttgtctaaggataaaactttacatggcttttcagagcaatgatctctctctctctctcttcagcatttaccattttttaaaaattttattttattattatgatactttaagttttagggtacatgtgcacattgtgcaggtttgttatgtatgtatacatgtgccatgttggtgtgctgcacccattaactcgtcatttagcattaggtatatctcctaatgctatccctccctcctccccccactccacaacagtccctggagtgtgatgttccccttcctgtgtccatgtgttctcattgttcaattcccacctatgagtgagaacatgcagtgtttggttttttgcccttgcgatagtttgctgagaatgatggtttccagtttcatccatgtccctacaaaggatatgaacttatcattttttatggctgcatagtattccatttttttcataagcacaaaaggcaagaagaaggaactaaatagtgtttatttattttaccatgagctgagagtttagcagcttgggagcatttttccacaatgccagaaccttgtctttgaatctttgatgctcctctagctcactgttccaaaatggcattttaaaaaccattgctgatactgcctaaagcaatttacagattcaatgctactcctctcaatctaccaaagacattcctcagagaattagaaaaaacaattttaaaactcatacggtgctgggcatggtggcttatgcctgtaatcccagcactttgggaggctgaggctggcagatcacctgaggtcaggagttcgagaccagcctggccaacatggtgaaaccccattgctactaaaattacaaaaattagccaggtgtgccagtggggtcctgtaatcccagctactcgggaggctgaggcaggagaatcgcttgaacccaggaggcggaggttgcagtgagccgaggtcatgccattgcactcctgcctgggtgacaaagtgaaactccattaaaaaaaaaaaactcatatggaaccaaaaatagagcccaaatagccaaggcagtcctaagccccaaaataatgccacatatctacaatcatctgatctttgacaaaatcgacaaaaataagcaatggggaaagtactgcctgttcaataaatggtgttgggataactgattagccatatgaagaagattgaaactagaccccttccttatgccatgcacaaaaatcaactcaagatggattaaagacttaaatgcaaaatttaaaactataaaaactctgaaagataacctagaaaataccattctggacataggacctggcaaatatttcatcacaaagacaccaaaagcatttgcaacaaaaacaaaaaattgacaaaatggatctaattaaactaaagagcctcttcacagcaaaagaaactatcaacagaataaacagacaacttacaaaatggaataaaatttttgcaaactaggcatccaacaaatgtctaatatccagaacctataaggaacttaaacaaatttataagcaaaaaacaagaaaccccattaaaaggtgggcaaagggtacaaacagacacttctcaaaagaagacatacatacaagtggccaacaaggatatgaaaaaatgttcaacatcactaatcattagagaaatgcaaatcaaaaccacagtgagatgccatctcacaccagtcagaatggcaactatgaaaaagtaaaaaaatgacagatgctggtgaggttgtggagaaaagattatgccctgctggtgggaatgtatattggttcagccatcgtgaaaagtgatgtgatgattcctcaaagaacttaaaacagaattaccatttgagtcagcaattttgttattgggtatatgcccaaaggaatataaattgttctatcataaaaacacatgcatgaatatgttaattgcattactattcataatagcaaagacatggaatcaacctaaatgtccatcaatgatagactggataaagaaaatgtggtacatatccactatggaatactatgtagccataaaaaagaatgagatcgtgtcttttgcagcaatgtgggtggagctggaggccattatcctaagcaaactaaggcaggaacagaaaaaataaataccacatgctctcacttacaagttggagctaaacaacaagaaaacacagacaaataagaggtggacaacagacactaggaattacttgaggctggatggtgggagaagggagaggatcaaaaaactatcttttgggtactatgcctatgatatggtttggctgtgtccccaaccaaatctcatcttgattttagctcccataattcccactgtgtcatgggaggaacttggtgggaggtaattgactaatgaaaagtgtgggtttttcctgtgctattcttgtaacagtgatacgaacaggaggcagggaaatactgggtagaagaaggtgcttccctggtaaaggccccaccctctagactggaaaccgtggccctaaatgagaacagttatctcagttttttcaccgaaatgttgccttttgggcccaacctgcccccctatcctgtgccccatataaacctcagacgtcagctggcaaagggacaagcagctgaacattgagaggagaagaagcaactgagtgtcggagactatggatagacatggcttaacttcagacggcatgacttcagaggggagcctggccagagatggctgggcttcagggaaaaagatcaccttcttcccacacccatctcctttccagctccccttccactgagcgccacttccattgcttaataaaatcctccacattcatcacctttcaaaccattagagtgacctgattcttcctcgacgccggacgagaattcgagatgcactaggtgcaggaacccaaaaaggctgtcactctgactcttcactgagatgtttaacacttaagctgtccgaagatggcaaagctaaaagagcattaactgtaacaaacccctaaatgctgccgtggggccagagcccaaaagcactcacctcagccctggcacccacttgcctacgtgctcatttctgtgaggggttcagcacagcaggtttgagcaagcgaagttcatccctgcaggcgctgaagtggctggctggacccagagctggtgcactccagttcctgcccaccaaagggtcaagggaactatcccatctcagtagcgaataagtctcacgagatctgatggcttcataaaggagaattcccctgcacagactcttttgcctgccaccacgtaagatgggactttgctcctcctttgccttctgccatggttgtgagggctccctagtcacgtggtactgtgagttcattaaacctctttttctttataaatcactcagtcttgagtatgtctttattagcagcacgaaaacggactaatatagctcatcaccttggtgacgaaacaatctgcacaccaaattctgagacatgcagtttacctatatagcaaatctgcacatatacccctgaaactcaaataaaagttttaaaaagtcatgactacaacataaatcacctgagggaactttttaaaaacacagcttccccaggacagtctcatagaggttatgtcagtatgaataaggtggatcacagaatctgcatttttactatgctcccttgctgattgtgatgcaaagctaggttcaagaacccatgctgtaagatgcttctgaacatcagctaccatgtctccatgtggtagaagagtgtttgaacttgctttccagtctttggaagcaaatcaacatcacccatatgtttaatcccctatgtgaaaataatttatgtatgtacatgtttttatatgccatctatactaaatgctatctaccaatcatctatttatctaccaatcatctatctatctattatctatctatctatcacctatctatctatctgtctgtctgtctatctatctatctatctatctatctatctatctatctatctatcacctatctatccatcctattggttctgtttctctggagaaccctgactaatacagacagtgtcctgggaataaaataagcctctgaataaatagcaacaggtgttcttcagatttgaaaatggtcacctggcagctgaatgtgacttgaaaatgaggtccaaggtaagcatgtggcactatctttcaggagaaaacgttccttgcagtgtagtcccttgcctgtgagggggcacagcttctgaaaacaaatacatctcctgctaaaatcttaggttcatgttcagcattttattgagatgacaatattttttatgctatgcagttaagaattgaggatgccagaggttttaaagatggaattttcaccaggtccagcgattacaacactcgtaatgtttggtaagtttggggaaaataatatgcctgttaaaatttggatttttaaaatttgttatgtcagtataataaccacaattttgtccaattcaaactcagggtgatatgcagctttttatttctgaggaggaagcagtagagactcagggacctggatagaaagttagtggccttctcagaaggagctctccctattgtaaactcttcctatgccaccatggtgaacctacccttttctggttatgttcaatatcctggtgaaagtctgcagctcctcttgagaactgcaaaggaaaatgagaatggaagcaacaaagactttgaagtcacatatcacgaagaaaaaaaaaacacctttcagtgggagaaactttgagcttaagtgtcagatgtggctgcttcatgctgtgctgtgagccaaacacaccgagtggggctgcaggcgagctgagacaaggttcagtggcccaggcaggaccttgctgctgaggagctgctgcatgactcttgctggtttaaggaaaacgtactgtggtttgaccttcagacactctagcagatgtaaagatcacctacatcgactctaaggacacagcagaagaacgggaagtgaatatggcctgagcataactctccttgtagaaagaagaaacagggtctgacatccttttccagagatcagtgaagtaagctctgtcttcttcttactaagttcagccctgtggctttgaccaagggcacctaaagaaatagtgatgtatagtatattgttttctctttagagatgcaacatgaaatatgtaaggttgcatctgcataatgtctccctggaagagggagggttatttcctagagcacataaggaagaaccccaacgcaactagttgttaaaaaaggagaaaatagaagggaagaaggaggaaaaagagagtaccacatgtaaacaaagaatggactgagagtgacatttgtcatagtttgttttgttacaaatcaaatagcagacatgaaatggtgccctcagaaaagtgaaaacaagcacataatttgtttgtggctcaagaagacatgaagaagtggctcacgtccaaatcctacacacattcctttcccccttctctccttctcactatatattggttagctggcttagtaaagcaaatcctaaattgagacagatgggtggtgccgtagagcctgatgaaggagaacactcaagctcaaattcttcatggcagtatagctcaggaatggtggatgggggaaatgctatagcttcctcaactccttgtgagcctttccttctcctcaaggagaaagaagtttaaggtagccatgtgggtaggggaagaaaatggaggagaaagagtacgactctctgaattgcattgcagatatacctgaggtctctgtaaatattggagtaacttttcttgtctagtacaggcatttaatgaatattcattttgatccataaaaatgaattttattttcaaggagaatggtgcttgttaagacaggaggatgatagagccattcatggtgtctcaatagctcagggactgaagtgaagcaactgtaaaagtccctaaaaatgttattatcagcgaagggtccttatcctcaatcttccccttttctctgtttcccttcctaagttttttctaacattttcttttatcactgaccctctctctgagtcttatgaatgagctgaagtaataacccctctctaattttattttctaccttttttttttttttaccagttctgccttcttagtttacatttttaaaattctcttttaataaaatattacatgtgcatgggtaaatgcaaaacttgaaagagagaaaaactgtacaattttaaaaagttccagatttttggttgaacatggttgattaaatattcatgtttattctctgctccctcctgaggccctagtgaaatgctaataaagaagttcaaagcctgtatgaacatacaaacacaaagtgaactgaaaagatggtgacagcacaagagagatcaacataacgttgaaggcgttgaaagcaaatggagaggtgacaaactggtttaaccaagagagaaaacctgtgcctgtagaggggaaagctgagagacagcagtcctgtgcattctgcagcattctggaaatgctcaagaattagaagcatcaattttgatggggaaaaaggcatcaggtgtggagggtagatgggaaagaaataggaagattaatggaaagactagcctcaagaaggagcagttggaacccagtgtaaccctcctatgtcctttgccacactgtaccacaggctgcaagctacctcaaatctggtggaagattaaaggttgaatctgattattttgaactagacagtctctggattagagaatactagagatatctgaggatgaaatgaggtgccataggcaaaacagggggattaagtgaaattctatatttctagtgttaagtccatcagctcctgtgcccaattcagtttaaaattctagttttccaaataatttttcatcagaatctaatatttgttgatgctgatgagaaatctaattccagtgggttaccccaattggagatttttttacttttatctccatacacatctggaattttttcccaacttatccttggtgttctagttttgctagaatacgtttaagtgtaagtctttttaattcagtgataatcacactttgcgggctattttcatctgaatatgcaatgtccttcagttgtgggaaaatttgttctatcacttctttagtaaatctctctcttctggttcttttttctaggacaaatattatttgcttgttttatctccaagattgattttctatgtagtagtatatttcagtgcatttttgactctttttcttctgtgtcctgagagattttctcaattttgtttttcagaccatctgctgatttttataaagttttggcaacaatagtttagtttttaaagagctctttgtggttgttgaatttttgttgttgattcttttaggttacatgtaactagatatttttgaacgttctcttttattcttagaattttgtttccctttgcatcagggtttctgattcttttcttgatatttatattttttgctttatactgaggcctagtcctccctgctgtcccttcatattataagaaggaaggactatacagctacaggtatttcctgtgtcattgtttatgtaggtctgttttccaataggtttccttgaagatgtgatttagctaaggaccttgagataggaaaattagcctggatcatccaggtggactcagtctaatcacatgggtttttaaaattggagaaacattccctgctgtggtcagagggagacgtgactatggttgaatgatcaaagagatgaaacattgctggctttgaagatggagggaggggttgcagaccaagaaatatgtgcagcctctagaagttggaaaacagactcactcctagaggcttcagaaagttataatgctgataacttgattttaactcaaaagagactcatgttgaacttctaacccacagagctgtaaaaataactttgtcttgttaagacatcaagtttgtgataacttgttatagcaaccgtatgtcaatttgcagctttttatttagaatatgtgaacaagggtttgatgctgctttcaacctcctcactcttgaacccctcaaactcctccccactctccaccagtgcaccaatgccagattgaagggttactcattacaatttatattgtagtctctcatatttgtgttttttccccatgacttccacttctgtagttaagtcatcatctcctttacatttttattcttttatcagtgggaattttggaaagataggcagtgagcaggtatggtcatctgatatctggaattagaagcattattcatggacttcttataagtgagagacaatctacaggcaaaaagaagcaaggcaatgagaatcccaaggacagatttgatttcctgttgctagaaacaatcacagtcccagaaaagatgctttctaactttagaaaaaggtccctattgccctgaggaaaggcagcgtgtttctctcttctcattttccctaaaattgatctcctggtgtgacagttactcgtttagccccagggtctacaggctgaagtgggagggaagaaaaggcctctttcagaagaacaggcttctttcagaaggacagccttgctattgccacaatcaacactatcttgttttacaagacttgactcatttatgtaaaactactggttgcctatctatgtcagatttcatgatcaaacagctcacatatctttttttcttttagatgtttttcttagctctggtctgctggtggtactccttcttggattccagggtaaatgcaaatgtatttttactctgtccctagttccttcagaaattatttatattttactttgcaatgccttcatcaatcctctcagttttttctgtagatactaaagtctatcaatgatgtcttgatgatgtagtacccagaattgggtgtaatactctggttatgttcccagcaaatagcaatgttattttactctcttatctgaatatcatattataatttttgttgatctaaagccactgtatctttgtaattctgcttgaagaagacaaagataatcctactttcttttcctagatgagggctcatgttctaggtgtcaggcctctgagcctaagctaagccatcataacccctgtgacctgcacgtatacatccagatggcctggagcaactgaagcaccacaaaagaagtgaaatagtcagttcctgccttaactgatgacattccactatagtgatttgttcctgccccaccctaactgatcaattgaacttgtgacattccttctcctggacaatgagtctcaggagttccccaccagaacaccttgtgacccccgcccctgcccgcaagagaaaaccccctttaactgtaattttccactacctacccaaatcctataaaactgccccaccccatctccctttgctgactcctttttaggacttagtctgcctgcacccaggtgattaaaaagctttattgctcacacaaaacctgtttggtggtctcttcacagatgcgcataacactagacttttattttgtacatctgatcttatttttaattttaccaaagtaggtatctccacatcctaccgcaacctcctctcaacctgatgctcactgcaacaagaccatttaaagctcagtcagaagagttgatctaactatttttgcttaaaggatgtctccacagcttttatacaaagatactgagggactccaaaatctgctagattcattgtgagatctttttctctgtaaattcctcctctcttttacagtcctcatttttcattgaggctaggattaatgtaatatactacagagggcaacacagtacagattagggaagaaagaaatgttcactggaagtttttgacatgtctccaaacaaggaaagcacaggttcacttcttgtggggagtctgtatcctcagtcctgaatctggcctccagagggtgacgttgcacaagggacagatggctgtttccaatgatgatcaacaaacactttctgctcagccccttcttcctgcagctggcttactgaagcaccgtcactggagttctttgaagatgggacaaatggagagaatcaaagattgaaaagcacttaagattatctcagcagattttgtattcttaccaaaacaagagacttgcctagcccaaccttcctcacgctcgctattctcaagacctgggttccagccactttcctactggccccgaggagaatttccaaagagacgcctgcagtgtttccacagctcagccatgctcctgttgctcataccagtgctggggatgatttttgccctgagtgagtaacattctattatggtctctagttccacagaagtaactgttttctgattcaaatcttagtagaaatacttttcatagacaagtctgcactattttcactgatacaacattgattttttcaggagatgccagagcccagtctgtgagccagcataaccaccacgtaattctctctgaagcagcctcactggagttgggatgcaactattcctatggtggaactgttaatctcttctggtatgtccagtaccctggtcaacaccttcagcttctcctcaagtacttttcaggggatccactggttaaaggcatcaagggctttgaggctgaatttataaagagtaaattctcctttaatctgaggaaaccctctgtgcagtggagtgacacagctgagtacttctgtgccgtgaatgccacagtgtctgggactgcaaagggagctgaacacaaacttcctaaggtgctagggagaataactgcctctgaaagattttggattctgtcacagtagaaaccatgatgttagtatttttaaaaaaatttatttttaatttttatggatacatagtaggtgaatatgtttatggagtacatgagatattttgatacaggcattcaatgcataacaatgacatcacgtaaaatggggtatccatcccctgaaacatttatcctttgtgttacaaacaacccaattatacacttttagttatttaaaaatgtacaattaaattattattgactgtagctaccctgttgtgctatcaaatactaggtcttatttattctttctatttttttgtacctgttaaacatccctcctctccccgaccctcccactatcgttcccagcctctggaaaccatccttatcttctactctctatcactatgagttcgattgttttgatttttaaatcccacagataagtgagaacatgcaatgtttgtctttcttgcctggcttatttcacttagtgtaatgatctccagttccatccatgctgttgctctaacccaaaagcatgtgagacgggtctcaatcaatttagaaagtttatttcccaaggttaacaacatatctgtgacacagcctcaggaggtcctgacaacatgtgcccaaggtagctggggaacaggttgcttatatacagtttagggaaacataatacatcaatcaatacatgtaagatttacagtggtttgatctggaatggcagtacaacttgaaggggagcttccagatcataggtagattaaaaaattttctgattggcaattgtttatcaatagaaagcaatatctggggtataataaggggttgtggaggccaaagttttatcatacagatgaagcctccacatagcaggcttcagagagaatagattgtaaatgtttttatcagactgaaaatatgtgttgatgttaatgccagtcagcccttaaattccaaaagggaaatccaaaagggaggggggtataaatgaggcatgtccaatcaccccttcccattgtggcccgaactattttttcaggttaacttcggaatgcccttggctgagagaaggggtccattcagatggttggaggcctgagaattttgtttttggtttatattacaaatgacaggatctcattcttttttgaagccatgatgttcttattccacagtacagagatgctcagggacttgccaggtgagtgtgaagttgctatattttaaatggttgagtatggaaattgtgacatggcacagagttttgcttttcattcaccattttatctttcaatatccagaacaaaaggtgaacttccttttgtaagcatatcttcttgcatacttactgttctttcaacttggtaattttaaagtagtttccctggagtcagcactctgtgctgattattttctctcctttttaagtgcttcatttaggaaggaggagatttattaggatgctggatggcttagaacaatggcatgctcatgtacagtctagtaaccttgtcaggaaaactgaagaaaggagagtgaataactcaaattccttagtagtttttacagaactattttttttttgagacagagttttgctctcgttgctgaggctggagtgcaatggtgcgatcgtggctcactgcaacctccgcctcccaggttcaagcgattctcctgcctcagcctcccaagtagctgcaattacagtcatgtgccaccttgcctggctatttttttgtatttttaatagagaaggggtttctccatgttggtcaggatggtctcaaattcctgacctcaggtgatccacccgccttggcttcccaaagtgttgggattacaggcataagccaccgcgcctggccgtaaagaactattaaggaggaacaaaatgctaggtctacttggaaagtcctatttattttttgtttttcccacttataaagaccaattcttattcttttgattcttaaattctgcaaatccacattataaatcttcaaaattgatgaaatagtaacttttgccaattcttccaaatgatgttattttagtttttactcttattccagtttcatatggttgtacagttggaatattagaaacgaattcttatctgtttaacactgccataattaagtgtgtgcaaaatttagcaatgtctggcccctgaagacattctaattaagtattgtaatgggaataaaaaggtcgaagggcatgtgatagatatatgacttctcctggttaggaagaaaaaaaatgtacaaacactttttaagcttcttacttgaagcctttaaggttaataatgacttgaagaaacgtaaagagaaagaggaggaggagggttgggcttttttgttgtgtacctcctgatgctgtcatgagtaagaggaataggaatttgaagatatagataataatagtggattgtttccagtgatttacctaagccaaaggggacaccagtagggatcagcattatttttcaggtcatagtgttatggctatttgtggtatatacctttgggggatttctggaaatgaagtaagatatataaaattattgataagaaatatatacttatttaaagtcttgttcttcagattatattctctactgtccccaagagactgatgatcttcataagacttaaaaacacagctaagtcctgtgttccagaatgactgcaagcaggtactttatacactacatatgagaaggacaaatggcaatttctttcaattccaaactgaagctcagtaccgaggaaatataactgctggcaccaagaacctcaagcacctggaaatgcattttctgctctcacaccaacaaccttgtttgagatgtcagagtagttctattgatatgattgttttataaatgtaaataactttatataatatagatattaaggagaaggtagaaatatttaacttctaacacaattatatttgccatatgaggagactgtaacattttaaacaatattatattatttctatctcttgatatcaataaatacataaatgtaaagtttcaaattttaaaaaataaataaaacattacagacaaaattgccatctcttttatttttttcctcagttttaatgccttcatccctctctcaaaataaacctattatgaacttttttctcaactccatgttttcatatttccaaacatagattttttaaacaatctgtggtgctgtgttttgtgtttttaaaatttacatgaatgtaatccaattgtatgtgtaattgtgaaacttgatttcttccctcaaatatttttcagatatagaaaaatttatatatgtagtatatttcatttcttttagctgatacatactattccattttatggatatactatatgtcccttttgatgcacattggattgtacatttacaaagctcaataggccacgtaagtattggtttccctcataccctgagtgttttcaagaggagtcctttcagctgtctatacagttcacagattactctttttgcaatgcctccctcccctcctcccacgtcaagtgctaaggtgcgagggaataagaccgaacaggccatccagacttagaaaccccataccccaaatagaaaccggtatctcctgtaacagttataaaagtcactgctccagaactatgacatcttaaaaagtattcacagtccattcacagttcagatgcagtttatcagtcaggatcatttttaccataaccatcttacttggtaatccagctgacgttctacctttattggatttccagaaaaatagagattagaaagttaatctaatttttttcatgtggaaggagaaaagattttgttaatcctttattcaatgagtgtttctgatcttttattataaaaattctacaaggaatacaattatgtttccttatacatagatatagaatgttttatgttatacacctggaagtggcatttgctgggttatatgattcacatctttaacaacgtacttgcaattgccgaattgctcttgaaatattcttacctatttttccctcattagtagcacagaagaattcctgtctctttacacccttgcaaacacttattatttcttatataacatcctgccctctctatctgtgtttcctgcatttctcaagtaaagtacgtatagtcattttttcaagatttgcttctggaagaacccaatataagagatctggtacagaagtggtcatagagaacaaatacatagaatgagattttggaattaaattattcatggccagaagggaacaaggatcccattattagcagtaggtgcagtggtaatagagatgctaaaagatcatagcatcacaattattaattgtggtgaattggcatgggattcatgtgtaagttgttgcagtagcttatgtgatatacttagcatttgagaagtattgtgataatggtaattttatgtgctatggagctggctatttattgtcaagtgccatcagggaagagcaataacaaaatggaaccagctaagaccactgcatatttcaacatctgtattcaatggtgatctttggaagacaatggctgctgcttcccatctgcctttcaaatcttgtgtaaatgctcttttgtattcagaaggggattctgggcactgtattttccagtgcagctacatcaacaatagaacaatccaacatagaaagccaagagccaagttcactggtgtgctacttagttcaccagtgtgctatgttgcacattgtcaactgggcttctttctcgtcccctttaatatattcccttgctttgctagggaagaaacccaaactacaattcacacaatccctttcattcacttagttttaattctacaaatgagaggcatttgggaataatatcaggcaagtagaaaagaaagagaaaccattattcttctgtagggactgtatgcaggcagctcagattaccagctgtgaggactttgtttgacttctgcgtttcttcctaagaatcactcattttggtgtcacaggcagctggatgatgcatcacacctcaaaatttcctgtaatcagtctttctcatctttgttcattagcccctccaatggttgtatgtctaattttgtgtattaaatcttactttttaaaagagttttaaaaataacttttactttagaaagttaatatgtgcattatagaaagctgagaaacacaataagcaaagaacaaagtcattcaccatcacaagcactttatagtttgatgtgtccttctgggtcctgtgtatgtatatagacaacatccaattttatgtgtgattgagatcatacagtatatatgatgttttttcacacatcatgaatatttaccagttcaaaatcccaaggctatatgagcattttgataacaaggaatataccacatcaactcaatctgttagaaaaaaagtaatcctgcctttcttggggacaaaaatttcaaagaagacaaaaatggaaacaggcctctaggttaaaagtaccgtcagagttacaattaaaataccacattccctttaatggtcaatttaaaaagagatgtaaagcaacagagtatactaagtataatgtttctaagagaattctttttctgatctgtactattaaatattagcaagaaggtatgttttcattgcattacttagtgtattcctatagtacagccaaaagagatgcacatacatcaatagctattatcaaaatgtaaatataaacatatctgcttacacctgtccctttatacttccttctgcccttcagctgccaatctactgaacacatcctgatacatacactgctcagaggtggtttaacaacaattccatgtccaaggtgcagcttttctatcaagcataaaaaatacatttacaaagtagctaatccaccagctctactttttctcatacgttgtcacctcagggcatctataaagcttagatgttgcaaaataaagactgaactttatccacaataaacacaggcaggttacagaaaatgcatatataaatctatggttaaatccaaaaaagtcacctaagtatggagatattagcaaagaggccttccctccatccttcctcttctttcaccattctagtgactaagtacctgattacatccagctccaaaagaaggattaacaaaggtcactgccagtagataggccttcttaaaaatgaacaaaaggacttttagaaaggcgttattttactacctctacctttaacatactttgggcattaggacttgtttatcttttaatacacagcaatattaacaaaaacacatacagggccgggtgcggtggctcacgcctgtaatcccagcactttgggaggccgaggcaggcggatcacaaggtcaggagattgagaccatcctggctaacacggtgaaaccccgtctccactaaaaatacaaaaattagcgaggcgtagtggtgggcgcctgtagtcccagctactcagagaggctgaggcaggagaatggcgtgaacccgggaggcggagattgcagtgagccgagatcgctccagtgcactccagcctgggcgatagagcaagactccgtctcaaaaaacaaaaaacaaacaaacaaacaaacaaaaaacaaaaaccacatacagaacaatggttagacgatctgaactaatctaacttacaggcacaaagcttctctctgcatacttccttttctccctatctcccagcatacaatgaacagtcagcaacctctctaagacatcaagtttaacagttccattccccaaatgcagctagtcctgtgaaatcacaaaaaatactcaaagagtgtcactttagctgtcttaatgtacatactttaacatatgttatgtacactttgaaatatctagaaagactagattttcatataagaacttaagttttccgttatacacagagtagcattgaattaactactaatgctataatgtgatagagttagtttactaactctatacctttgtcatacactggtaacctctttagcatctagaaagactagatataaattaggattaatttgtcctttatatacactatatacacagataaggaaaacaaaatgcacagacgtaagagacaatggctaatgttgcctcattgtaagcacattgccacagaactctttacacttccttctcctcccaggagccagcacacaaacataatgtgtattactcaagaggtggtttggccattcccctctccagcccccagtcaacatttcatatgaattttaagaaacagatatttaaaaaatttgttattttctacctctacttttgacagctatgaagcactttagaacatcaagaaaggcaagatagggcaggcgtggtggctcacgcctgtaatcccagcacaccactgcactccagtctaggtgacagagagagactccttctaaacaaacaaacaaacaactacaaaaaaaccaaaacaattagccgggcatggtggtgggtgcctgtaatcccagctgcttgggaagctcaggcaggagaatcgcttgaacccaggaggtggtggttgcagtgagctgaaatcattccattgcactctagcctgggctacaagagcgagactctgtctcaaaacaaaaacaaacaaacaacccccccaaaaaaaacacaccaaaaaacaaaaaaaactagatctatacagagcagaggcctcagaaataacgccacacatctacaaccatctgatctttgacaaacctgagaaaaacaagaaatggggaaaggattcctgatttaataaatggtgttgggaaaactggctggccacatgcagaaaactgaaactgaaccccttccttacaccttatacaaaaattaactcaagatggattaaagacttaaacataatacctaaaaccataaaaaccctagaagaagacctaggcaataccattcaggacataggcatggacaaagacttcacaattaaaacacaaaacgcaatggcaacaaaagccaaaattgacaaatgggatctaattaaactaaagagcttctgcatagcaaaagaaactatcaccagagtgaacaggcaacctacagaatgggagaaaacctttgcaatctacccatctgacaaagggctaatatccagaatctacaaagaacttaaacaaatttacaagaaaaaggcaaacaacctcatcaaaaagtgggcgaagggtatgaacaggcatatctcaaaagaagacatttatgcagccaacaaacatgaaaaaaaaagctaatcatcactggtcattagagaaatgcaaatcaaaaccacaatgagataccatctcacgcaaggtagaatggccatcattaaaaagtcaggaaacaacagatgctggagaggatgtggagaaataggaacgcttttacactgttggtgggagtgtaaattagttcaaccattgtggaagatggtgtggtgattcgatctagaaccaccaataccatttgatccagcaatcccattactgggtatatacccaaaggattagaaatcattctgctataaagacacatgcacacatatgtttattgcagcactgttcacaatagcaatgacttggaaccaacccaaatgcccatcaatgatagactggatgaagaaaatgtggcacatatacaccatggaataccatgcagccagaaaaaaggataagttcatgtcctttgcagggacatggatgaagctggaaaccatcattctcagcaaactaacacaggaatagaaatccaaacactgcatgttctcactcataagtgggagttgaacaatgagaacacatggacacagggaggggaatatcatacaccagggcctgtcgggggagggggagtgggggagggatagcattaggagaaatacctaatgtagatgacgggttgataggtgcagcaaaccaccatggcacatgtatacctatgtaacaaacctgtacattctgcacatgtatcccagaacttacagtaaaaaatacataaataaaaataaaaagaaagacaagatatttcaaaaaaattcttagcattgtcaacaatatatacagtagtgaggaataaaatgcgcacataaagcagtggttataatatgaaaatgtctcctaagcatgaccagtctggaaaagaaccttctcttcattctcactgccttctgctccatggcctctaacccactgaatgaacgtggtggtgtgttgctcctggagtcacttctacagctcgtctaacaactttcgtttcaaagagtcatttccagaaggcgtttgctttctaccattttttaaaagaacaaatgggcatttacaagacgtgattttcttttttctttattttattttatttttttgagatgggctttcactcttgttgctcaggctgaagtgcaatggcgccatctcggttcactgcaacctccgcctcccgggttcaagcgattctcctgggattacaagcatgtgccacctcgctcggctaattttgtatttttagtagagatggggtttccccatgttggtcaggctggtctcgaactctggacctcaggtgatctacccgcctctgcctcccaaagggctgggattacaggtgtgagccaccgcgctcggctgacgtgtgattttctaactattatacgtcagcaaccttttaaaatctagaatggctaggtagagcaaaaattttcttttaaaaggttgagggaaaagttgagagcagctttttcatattatttacctgggccttctataaaggccagtaaatcctcccaaatggtggggggcatttccagtccaccaaatgtggcatgtgatttctctctttgggtatcaaggtctggtagaacaaacggcaaccacgcaatggcctgctaaccactccacctgtccttgtgggggctctgctcaccttctaggcccttttaggcctttgtccatcatttctggcatttttgggaggaggtaaggtcttgtctaactgggacaaagtggtcagcccgggacccgcatctgtgcaactccatggcataatgaagttcctgagcttgtgtctctaggcccaccttcttgggttctgcaaactactgcagccctcagcgccttctggcggccgccattcttcttcctctgcgacatccatttcctcccaaaggcacggtgtcctccgcagctcggtgagggcttcgccaaggcgcagcaggatttctagatgttctaaagtgctttatagcccagcgaggtctgggcccagagaggctgccgccatcagctcactgaagtggggagagaaggaggtttgcagggccccagctcacctgcctctcagtgcgctgcttctcaccacattgtctgcctgaactctaaatgtctttctactgaaaatatttggattgttttatgaggagaccgaggaccacctcgtggccatcaagcagatcatccagaggcaaaactccttgtctgaggaattcagaagtaattattaatcgacgtccctattatcaaaagcaggcatctagtaccgggcttctttcccaaaaatgtataagtaactagaatttctatacatctctggaatgcatgtatgttgaaacttattgtgcagcccttgctgacatcaaagcaccaaaatgtctacaaatgtaatcatttatcctgacctaggtggctaatatggtccaaattacccttaagctcctgctttaaggttcataaatgctcctaaggaaaaatccacggtggcttgctcagtccgctcttgctgaagcgccctgctgcactcctctgcagcactggttctaataaagctttccttttcaaacccacactgttgtgggtaaattcttattaccatgagccaatcactttccgttgctgtggcgctgacacctcgcccagcatttctgtttgccggactgcctctcgactgacaacagatctgtataaattcaagtccttgaagcggagcttctgaggcttgcagtcagaccatttggataaatctagtatcagctgggaatttgcttaagcattttttcattgattacacagttctaccgtatttcactcaaatctactgctacagttcttctatggtattcatctccttttgaaatcatggtgatatggcttggacctgtgtccccacccaaatctcatgttcaattgtaattcccagtgttgcaggtggggcctggtgggaggcggttggattactggggtgggccattcatgaatggtttaacaccattcccttggttctgttcttgaaatagtgagtgagttcttgtgagatctggttgtttaaaagtgtgtggcaccttcctgccctctctctcttgctcctgtttctgccatttaagatgccgtgcttcagctttgcctttcaccatgattggaagcttcccgaggctcccagaagcagaagcctctatgcttcctgcacagtctgcagaatcatgagccaattaaacctcttttctttataaattactgagtctcaggtatctatagcaatgcaagaatagaccaatacacctggtgtggaaaatagattccctcaaaagaatggagggttgttacaatactaaggacaaggtttccgtggaaaaagtaaagaaagttaggaacagtgaaactgcttgctctatatttctgtttagacttcaggtagagtcagttagatgaatgggccaaaagaaccaggaaaaggaggaagatgcagcttgatcacagagatctgacacagggtaagagggaaaaggaggagagcctttgtatagagccaaataatatccagatctaaattttcttcccaagtttagagtttgttaacatttacaccttgctgcagaaccatgtagctgctgtctctgaattcatggagagtgaatattccaggaagcacaatggaaggcgtccaggttcaaagataaatggtagtggggctgacagaaaaacagcatccttcttaccaagtttgtcctgggaacatccagagatttttattataagtcgactaaacaagaatagtgagagttaacagcaattgttttagctactgtgacttcagtactaccatgaaaggagaatctgtgaggattggagttttttcctcatgctcatcccacaagtgcttcactgataccttgtctgtctgcttaggtcagtgttctcaaagattattttgtgaatgtgtataacactggctgtatgacaaacacctgaggagatttttaacttccaggatcttgattctgaacattttgattttgtaagtgaggagatctccaaatctgtattttaaagatgatcaccaactaactcttacatgaagagaagtgtcatccttgctatgattctatacatcagcagacatgtctctaccaatcctagaagctgagatgggctttttctttggtcttttgaggcaaatccaaattatttaagtatcttatcccgtggtaaaaataactattggtcaatagtattggtggatggacatatgtagggggtatataatcaaggctaaatttccattaaaaggttagtatcacaacactttgcctcatgcacataggccagtcacattatctgggaatcatttcttctcctacaggagaagaaagtgatgccagataattttgtagggatttaatgactttagttactatattttttcattataagagttatatattctttactttttaatcaatatatacacaagatataatttccttttttctttgaaaagaatttattaattggaaattacaattaatttatttctgtaattgatgccttaaatgtgaagcaatatgatatttcaagtagtaacaattcctcaaccaaagaccattcatttattcatgcatttgtgtatttaagaagtgtttcctaaccacctgctgagtgtttgacattgtactaggtatgggaatacagcagtgaaaaaaagcttaagtctctctcatctcaaataatctactaatgtttaaacatgtgctactgacattcctctggttttatcctaaaaaagtgctaatacggtattttagtggatcatgggttgggcaaagatggctaaataagaaaaggtaaaatgaattattctcagaaatgccatggtatgaaaagaacttgcaagtcagacagtgtgctgttaaaaaaaacagagttataaaaaagaccaactattctttagatatacaaagaactatcagacagctaataggtgtcttagaaaaaaaaaaaaagccagaagtgaagatacaggattgacttttgaaagaacagtcaacaatcctttgagtttaggatcttgcccacaaaggggtgcatcttcctaacacattcacatttcctgctcacgctcatttcttcagtgtgaccttaacttttcctcacactaagaagacaagacccaagggcaccagagggtctaaaaatgaattcttctccaggaccagcgattgcactattcttaatgtttggtaagtaaaatggcacttaaaacttagaatcttttgttccattatgttgatgtaatctgtaaccacagttttctctaacgggtacagctaagatcacgtctaaggtaacttggtataatttgtttatttttttttcagggggaatcaatggagattcagtggtccagacagaaggccaagtgctcccctctgaaggggattccctgattgtgaactgctcctatgaaaccacacagtacccttcccttttttggtatgtccaatatcctggagaaggtccacagctccacctgaaagccatgaaggccaatgacaagggaaggaacaaaggttttgaagccatgtaccgtaaagaaaccacttctttccacttggagaaagactcagttcaagagtcagactccgctgtgtacttctgtgctctgagtgacacagtgacagggactgcaggggaagctgagcacaaactctgagcagcacgaggggcctggctgctgagtgtaagccactgtgatcccctctggttagggaccaggaactactctactattgttgcccaccacccaccctaggcactcctagtgtgaaagccatccaaataaactctaaaacactatagaataactaaaagtaaaaatacctcacaccagatgctttaacaatgagagtgaaaacagaatgtcaccatagttcctcaaccttgtttgaaatttgtgattttaaaagtataaaaccttgagataaatgaaatggtctagctgctcatccctgtataaaatgtagcctcctgaccttgtctcaggccatccaaggaaatagtatgcttacagacacagctgtgacagatgaggttgcaaatgcttaatgcatacctgagtggggtatacattcagctggggcaagatggggtgatttcttaggaaagcttctgcccaagaaataataggttcttaaagaaaaaaagaattataaatggaagaagtcaaattttccttgtttgcagatgatatgattttatatttggaaaaacatagagactccacaaaaaaaccttagaactaaaaattcagtaaagttgcaaaatacagaatcaacctataaaaatcagtagcatttctatatgtcaacaataaacaacccgaaaaagaaataaaaaagtaatcgcatttatgatagccatgaataaaattaaataactagggattaacttaaccgaagaagtgaagatctctataatgaaaagtataaaacattgatgaaagaaatcgaagaaaacaccaaaaaaaatactccgtgttcatggattgtaagaattaatattgataaaatgtccatactaccccaaacagtctacagattcagtacaatccctaaaaaaataccaatgacattcttcacagaaatagaaaaaaaatcctaaaatttatatggaaccacaaaagacccagaatagccaaagttatcctaaacaaaaagaacaaaactggaagaataactttacctgactttaaattgtactacagagctatggtacatgaaaacagcatggtactgtcataaaatcagatacatagaccaatggaacagaatagagaacccagaaacaaattcacatatctacagtgaactcatttttgacaaaggtgccaagaacatacactggggaaatgacagtctcttccataaatggtgctgggaaaactgtatatccatgtgcagaaggatgaaactagacccctgtctttcaccatatgcaaaaataaaatcaaaatggattaaagacttaaatttagatcacaaactctggaactactacaagaaaacactgggggaaatctccaggacattggtctgggcaaacatttcttgagcaatatcccacaagcacaggcaaccaaagtaaaaaggggcaaatgttatcacatcaagttaaaataccctacacagcgaaagatacaatcaacaacgtgaaaagacaatacacagagtggtgaaaaatatttgcaaactacccatcttacaagggattaataaccagaatatatgaggagctcaaacaactctataggaaaagatgaaataatctgattaaaaaaacaggtaaagatttacatagacatttctcaaaagaagatgtacaaattgtaaatgggcatatgaaagggtttttgacatcattgaccatcagagaaatgcaaatcaaaactaaaacgagatagcatctcatcccagttaaaatgatttacaagaaaaaaacaaacaaccccatcaaaaagtgggtgaaggatatgaacagacgcttctcaaaagaagacatttatgcagccaaaaacacatgaaaaaatgctcatcatcactggccatcagagaaatgcaaatcaaaactacaatgagataccatctcacaccagttagaatggcaatcattaaaaagtcaggaaacaacaggtgctggagaggatgtggagaaataggaacacttttacactgttggtgggattgtaaactagttcaaccattggggaagtcagtgtggtgattcctcagggatctagaactagaaataccatttgacccagccatcccattactggctatatatccaaaggactataaatcatactgctataaagacacacacacacgtgtttattgtggcactattcacaatagcaaagacttggaactaagccaaatgtccaacaatgatagactggattaagaaaatgtggcacatatacaccatggaatattttgcagccataaaaaatgatgagttcatgtcctttgttgggacatggatgaagctggaaaccataattctcagcaaactatcgcaaagacaaaaagccaaacactgcatgttctcactcataggtgggaattgaacaatgagaacacatggacacaggaaggggaacatcacacaccggagactgttgtgggtgggggaaggggggagggatagcattaggagatatatctaatgctaaatgacgagttaatgggtgcagcacaccaacatggcacatgtatacatatgtaacaaacctgcacgttgtgcacatgtaccctaaaacttaaagtataataataataaaataaaattaaaaaataaaatgtcttatatccaaaagacaggcaataacaaatgctggccaagatgtgaggaaaagggaaccctcgtacactatcgattggaatataaaatagtacaatcactatggagaacagttttagtttcctcaaaaaactaaaaatagagctactatgtgatccagctgggtatatacccaaagaaaggaaattagtatatcaaggagatatctgtaccccccgtttgttgcagcactgttcacaatagctaagatttggaagcaacctaagtgttcatcaacagatgaatggataaagaaaatgtggtacatatatgcaatagtaccattcagccataaaaaagaatgagattctgtcatttgcaactacgtggatgaaactggagatcattatgctaagtaaaataagccaggcacagaaagacaaatatcacatgttcttacttatttgggggatctaaaaatcaaaacaattgaaatcaggaacatagagagtaggaggatggtctgaggctgcaaagtagtggggtgggagagggagatggggatggttaatgggtaccaaaaattagaaagaataagacccaccatttgatagcacaacagggtgactatagtcaacaataattgtacatttaaaaataactaaaagagtgtaattgaattatttgcaacacaaaggataaatgcttgaggagaaggacaccctattctccatgacgtgactagttcacattgcatgcctgtatcaaaacatctcatgtactccatgatatatacacctagcatgcacctccaaaaagtaaaaataaaaataagtaaaaatttaaaaatcattaattaaaaaagaaatataagaaataatggagaaggagagagtagaacatgtgatcacatatatggaaaaagaagatggaacatttcttagtttctattttgggaaattacatgacatgcatagactggttttgcccaaaagatgaaactaatccctaaaaaatatgactcatggccaggcatgatggctcatgcctgtaatcccagcattttggcaggctgaggtgggtggattacctgaggtcaggagtttgagaccagggtggtaaaccccatctctactacaaatacaaaaattagctaggtgtggtggtggttgcctgtaatcccagctacctgggaggttgaggcaagagaatcacttgaacttgggagacagagattgcagtgagccaagactgtgccactgcactccagcctgggcaatagagagatactctgtctcaaaaaaaaaaaaaaaaatgactcatgcctaaaagataccttgctgagatattatgacagtagagaattttagtttgcatgatatctcagcaagatggctttctctcactaagacattacttaagatatataggtagtgttcagagtctggaagatgcaaactattgagatgaaactttttctatgtagattggtgtgagaaaggaatcttatagcttccccaatgtctttcaagccatttcttctacagaaggggagtaacagatgaagtggtagatggcggccagggctatgagaagataaagaatggcaaaaagaagaatttttggatttaattgcagatatcttggcatctttgctaacattggagattttcttttgcttgtctattgaaggtgcttaactcatatcaatcagtttattgacccataaggagtgcatttttgctcattataagggtccttaagcacaaaaagtgagagtaagaggatggtatgcaagatcccctgtttcacaggctacaaaggaatggaactattcagattagtgatataataattgacactgaagatgccttgactttgactctttcatttttcatgatcaccctgctttagtttctctcttagcttttaattttattccaaaggcctcaatttagatcttattagttagttgagctaataactacctatacaaaataaataatttatgtacatgggaaaaataactttagatggttcaaatgactatgcaaaatatctctgacttttggctaccacatggccaggttacaaattttccaaacttttttggcctgctttccttttacatataagttccaatttcagatcctttctttgctcacagatataagcataggctgttacaagcagccaggccacatcttaaacactttgctgcttagaaatctcttctgccagataccctaaatcatcactctcaagttcaaagttccacatatccctagggcagagacacaatgtggccaagctctttgctaaagcaaaacaaaagtgacctttgctccagttctcaataagttcttcacttccatctgacatctcatctgcctggactttgcagtccatgtaactatcagcattttggtcacaaccattagacaagtatctaggaagttccaaactttcccccatcttcctgtcttcttctgacccctccaaactgttccaacctccaactgttacacagttccaaagtcgcttccacatttttggttatcctttcagcaacacctcactcctggtaccaatttactgtattagtctgttttcatgctgctgataaagacatacccaagactgggaaatttacaaaagaaagaggtttaattggacttacagttccatgtggctggaaaagcctcacaatcatggcagaaggcaaggaagggcaagttatgtcttacatggacggcagcacgcaaagagaacttgtgcaggaaaacttccccttataatagccatcagatctcttgagacttactatcatgagaacagcatgggaaagacttgcccccataattcaattactttccactgggccctcccacaacatgtgagaattcaagatgagattttggtggggacacaaccaaaccatatcaacttctttacttactaatatgcatttaaggtttctaagtgcttttcatgtcttgatagctcatttctttttagtagtgaataatattccattgtctggatataccatattttatttatccatttacctcctgaagggcatcttggttggttctaagttttggcaattattaatatagctggtataaatatctctttgcaggttttggtgtagacataagttttaactacttttggtaattaccaaggagcacaactgctggactgtatggcaatggtatgtttagttttgtaagaagctgccaaactgtctcttaaaatggctgtaccattttgcattctcaccagtaataaatgagatttcctgttgttccacatgctcatcagcatttgatgttgttggaggtctggaacttgggcattggaatagaagtgtcagggtatctcattgttttaatttacgttttcccaatggcatatgataaaaagcatcttttcatatgttcatttgtcatttgtgtatcttccttggtgaagtgtctgtcaaggtctttggcccattttttaatcaggtcgtttgttttcttattattgaattttaagtcttcttgtatattttggataacaattctttttttttttttttttttgcaaatactttctcccactctctggtttttcttctcattttcttgacattgttttttacaaggtagaaatttaaatttttatgaagctcagtttattattgatttctttcatggaccatgcatattgtgttgcatttaatgactcattcccatgctgaaagtcatctaggttttcttctatattatcttttggagttttacagttttgcattttacatttaggtttataatacattttgagttaatttttgaagactgtaatgtctgtgtctatattcattttcatatgtatatatattttttgcctgtggatatccagttgttcctgcatcatttgttaaaaagactatctttgccccactgtattccctttgtttctttatcaaaaatcagttgactttgtgtatgcaggtatatttataggttctctattctgttccattgatctatttgtctcttctttcataaatgacacactttcttaattaatgtagctttatgttaggctttgaaattaggtaatgtcagtcctttgatttgttcatgtctttcagaattgtgtttgttattctggttttttgcctttccatatatgctgtaaaaagaattcatcagagtccctccaaaaatcttgctggacttttgattgttattacaccgaacctgtagatcaagctgggaaggataaacattttgactatattgagtcttcttatttatgaacatggaattcttcatttctgtagttgtcctttgatttctttcatcagagttttatagttttctttatgtagatcttgtaaatattttgctagatttatacctacatattttaccttttgggtgccaatgtaattgttttctgtttttagctcaaattccacttgtttattgctggtatataagaaaatgaatatgtatataatgtatataataataaataattacttatatacaatatatcatattttatatgttaaccttgcatcctgcaacgttgatactattgcttactagttccaggagttttctttttgtcaattcttttggatttttttatgttgatgatcatgtcatctgggaagaaagttttattttttcctgcccaatctgtatagcttttcttttcttgtcttgtcttattgcagtagctaggactcctgatatgatgctgaaaaggagtagagagaagggacatccctttcctgatcttagtgagaaaacttcagttttctcattatcaggtatgatgttagctgtaggttttggtagacactgtttactgtattgagaaagttcttctctattcttgttttactgagttttttttttgttatgattaggtgttgaattttcctaaatgctttttctgcatcattgataagatcatgtgatttttcctctttagcctgttaatgtgatgaattacattaaatgactttcaaatctgaaccagtcttgctatttgttgcccttgttctttgttcttattctgtcttccactctttttttttttttaataattccttttctggtttttttaaggattttttttttaatctatgattttcttttttcttttattttggtggtggtggaggtggggacacagtctcactgtgcccaggctggagtatagtgatgtgatcttggctaactacagcctcaacctcttgggctcaagtgatcctcctgcctcagtctccagagtagctgggaccacaggcatgcaccaccacgtccagctaatttttgtattttttttttttttttttgtagagatggggttttgccaagttgccctggctggtctccaaatcctgagctcaagtgattcacccaccctggcctcctgaagtgctggaattacaggcatgaaccactgtgcccagcctatctatgattttctataatttgaataggaaatatttaggtattttgttttgttttggtatatatcttgctgtgtgttctctgagcttcctggatctgtggtttggtgtctgacattatctggggggtaattctcagtcattgtctaaaaaaaatcttttttgattaatttctctctttcttctctatctgatattccccgtatgtatatgtgatactttttgcaactgccctacagtttttagatttttttccattttttcttttgtctttgttttctttgcttttcagttttagatgtttctactgatctgtccttaatctcagaaattctttccttggctgtgtcccgtctactaataagctgatcaatgatattcttcatttctgtgacagtattttgatctctagaaattttttgttctttcttaggatttccatctctgttacattgcccatctgttctggcatgctgtctactttattattagagctcttagcatatttgttttaaattcctggtctgataattccaacacccccgatgtgtttctctgatgcttgctctgtctcttcagattgtttttgccttttaatatgccctgtaatttttttcttgatagccagacatgatgtactgggtaaaaggaactgctgtaaatatgctgttagtgctgtggtggtaaggtgtgtggggaggggaagtgttctataggcctacaatttgttctcagtctttgagtgagcctctgggctgtaaacttctccagtgtttcttagtctccctcactcctcacacaccctttagctgggaaagaactcaagggtgggctgaagttgggtatttctcttccaccaggtcagttaacctctgataaaaccccaacaggttaggctttggttaactggtttctcctgagggcagaactttgttaaggacagagtgctgcagtgtatttcagaattattccttttcctctatccatgctggaagtgcaaggggatttttctgtgatatttactgtggaagcctggtcaagttgctgaagataaaacttataaaagtgtggccccagcctccccaccccatgactcagccttcctggagtttttgactctcagacttgtcctttctgagcctaaaacagttttcaaaatacagttgaggttttcctacctcagcaatggttcccataaatgcttctgcttctgagtctttgttccagtaagccacgactccctgcattcacctaattgtccaatcctgggggcagtggtatgcccgatgtcctcacctttattatggatccaagatgaattgttgaattttcagtctgttctgctttttacttattaggagtgagtggcaactttaaagctccttacatgcagaaccagaaactagaaatcatctgttattgtctttttaatataaattttgaagaacattctctatattaagaaaacttgtcatataaccatcatataatgtatacctatatcttcttaaaaagtgtattatcattttgactttacttatgatcttgtttgtcatgcagaatttaaaaaatactatatagtcaaatttatcaaaacttttttcatggactgtgagttataagccctgcttaaaaatccataccactccaaaatggtaaaattttatactgtattttctttagtttttcagacttttttgtatttaaatttttaataagagtgtgtatgtaaaaaatgaggttgatgtccagggatttttatttttcttatttttttggttcattttgaggctgccactcatgctcaacatccttttctgaataactcatttttcttcattgatttaaaatgttatatttgtccattttccacgtttcttatttttcgctattaaggttttcaacttaagcattaaaaaaatccaaaatggattgtttattgttaatggtgcataataccaatagcttactgaatatgagagtaatatgcagccagtcatcactgagctcatgctagaaataagtatgggattatgatgtgaatagaaggaatgttactagaaatggagaaagagataaactgtgagagtgtgtagtgaggtgtcacctaaggcaatgtaaactatatgcctgtaatctcaaacttgtcagttgtttccagttgagaggactcagacaaagcagtagaaaatcatgctcataaattgttcactgagtaagaagtagacaaccagctttggaaaacaatgacaacttggtatcttctttgttcttcttgaagaggagaaattaaatagtcaacacttggttttagagttctgacaagttccaactagttgaaatgccttggaatttgcagctacttcaagtttgggatgctgtcattgttctggaagaagatttttgaattttttctgttaccacatatgctccttgatgatgtttagttatatccactgtggaaactatcatagctctctgagaatgttgttgaaaattgattatatttcaaatatagtgcccctaatttaagccgaatgagtatggacaggtcttttttgctgagatttcttcttcctgcctctccctctccttcaccctcttgttcctctctctgtcctctgtcctcttttctttctcttccttgactttgctggactgattccatgatcctttcctgaagtaagcatctctgggggatcaacccttactttggactacaatgccattgccatcaatatttaaaagtaatctcaccataagataccatctcacaccagatagaatggtgattattaaaaagtcaggaaacaaccgatgccattgaggatgtggagaaataggaatgcttttacactgttggtgggagtgtaaattatttcaatcatcgtggaagatggtgtggcgattcctcaaagatctagaaccagaaataccatttgacccagtaaccccattactggatatatacccaaaggattagaaatcattctactataaagacacacaaacatatgtttattgcagcactatttacaatcgcaaagactgggaaccaacccaaatgcccatcaatgatagactggataaagaaaatgtggcacatgtacaccatggaatactatgcagccataaaaaagaatgagttcatgtcctttgcagggacatggatgaagctggaagctatcattctcagcaaactaacataggaatagaaaatgaaaaaccagccagtcacagtggctcatgcctataatcccagcactttgggaggccaaggtgggtggatcacctgaggtcaggagttcaagaccagcctggccaacatggtgaaaccccatctctactaaaaatacaaaaaattagctgggcgtggtggtgggtgcctgtaatcctggttacttgggaggctgaggtaggagaatcacttgaacctgggaggtggaggttgcagtgagccgaggtcatgccattgcactccagcctgggcagcaagagcaaaactctgtttaaaaaaagaaaaaaagaaaagaaaactgaacaccgcattttctcattcacaagtgggaggtaaaaaatgagaacacatgaacacagggagggaacatcacacaccggagccagtcgggggttagggggagagcagagggagagcattaggacaaatacctaatgcatgtggggcttaaaacctggatgatgggttgataagtacggcaaaccaccatggcacatgtatacctatgtaacaaacctgcacgttctgcacaagtatcccagaacttaaaaaaaaaaaaagtaatctcattgtaaaggaaagcagctgttcacaagagcatataaaactaacaatggatctatattatttaggttcacgcagatttaagactgtgatgtctacatgcaactctctgtatatatctatctgtattgatagagatatgtacatatctatatctgtatctatctatctatatagagagatttattttaaggaatagtttcacacaattttaggggctgggaagtccaacttctgcagggcaggtcgtcaggctgggcaacctgggaatcactgattttgcagtttgagtttgaagacaagtctggaggcataatttcttcttctttggagagcctaagtgtttttcccttaagaccttcaactgattgaatgaggtccattcacattatgcagaaaatctgcattactcaaagtctactgattcaaatattaatctcatctaaaaacaccttcacagtgacatctagactgatgttggaccaaatatctgggtactggggcctatctcagtggatgcataaaattagccatcacacggtctttacctctagcaaatcttttccaaaagcctactttgcttatacaactataatataccaactttctttttattgtttcttgtataactatttccattctttcaacttctctgagctttaaatttcaaacttaaaataaatcctcatatatctacactctcaactgttcataagcttcttatttcactgagaaaatagaaacaatcagaagagaattttcaaaaacttcaacacttaccagtcacttgcatctatgctcaaatactctgtctttcctctcattagaatgtcatcccctgtgtgcagggactttgcttattctcagcacttatcatcatacctgaaaatgtaggcatttgaaaaataattgttgaattaaaaatgaataataaaaataactctgtcattaccagaacaaaactatcatttattcattccctcaataaaaatttattatatgcctatttattgacaggccttattctagcaactgacaatgtagcagagaatagaacagataaaagtccctatcctaagggagcttatatttcagttgaaggctaagttcatgttagccactacaataagcctttacatgaatcatctcttcaatctttcaaaaattgttaggtaagtgttatcatacctattttcagatgagaaagctaaggctcaactctcctatttaatatcacatagagccagaatgcagagcttcaaatatatgtctaaattactaatctactgtgctgatatagacatgaagggctttatcctctatatcatgctgcaaataggaggaaaaaagcttgatcaaaagttctaagcaattgtagctctgaccccaagagggcagtatttgcattcgccccgcctgcaggtctgaatgtgtagtatgtgtaacatagcgaagcctggtctctgattggctagggataccctctgagaaaccctttggttagtgttaaaaaaaaagagaagatgttgaatacacaagtcaacttctgggagcagatctctgcagaataaaaatgaaaaagcatctgacgaccttcttggtgattttgtggctttatttttatagtaagttagtggagagttttagcaaagttaacatagtaagtcaagggaatattttcttaggatttggggtgaagatgtagtccactgggataggaggaagggagaaaatgggaccattttctgtttcacttgggattcattgtggggagtaaggaagggatgcaaattagacagtattaatactggatgatggatctcttgaatctcacttttctttctgaataggggggaatggcaaaaaccaagtggagcagagtcctcagtccctgatcatcctggagggaaagaactgcactcttcaatgcaattatacagtgagccccttcagcaacttaaggtggtataagcaagatacggggagaggtcctgtttccctgacaatcatgactttcagtgagaacacaaagtcgaacggaagatatacagcaactctggatgcagacacaaagcaaagctctctgcacatcacagcctcccagctcagcgattcagcctcctacatctgtgtggtgagcgcactgtgctccacaggcacttgaagccagtatgcaaacctgcacctggaggttatcaaggaggcataggagttagagtagaccgttattttttatgcagaatatgatttcactagtgaatatttatctctccgacatgatttgatttgagcttgagcctaaagttctacttaggctcaagtagaatacatgtcctcaagcgaggataaagacattctcactcaacacacaaagttaattgctacatctgggtgttcccaagggcaagacagtctgtcatgctgtgttactattgctgaagtagatgacagtgttgtttggaagggagagactagcttggtttttgatctggacacctaccagcagaatgtcaactaagtgaaagagcaacaagtttatgtggctgatggaaatttttttttttttttttttttttttttgagatggagtctcactcagtcgcccaggctggagtgcagtggcgtgatttcggctcactgcaagctccacctcccgggttcatgccattctcctgcttcagcctcctgagtagctgggactacaggcgcccaccaccacgcccggctaatttttttgtatttttagtagagatggggtttcaccgtgttagccaggatggtctcgatctcctgacctcgtgatccacccatcttggcctcccaaagtgctgggattacaggcgtgagccactgctcctggccggaaatatcttgagaagtttccttcccctgaaagacattcagttgtcatttcatggctattcaagttctcagaaagcatcctgtgagaataaatctgctcttcccatttagctatgctccagatcaaggcttttgtccaggtgctgcatcaactctttattatcttccatcactgctcctttagaggacactggaaggccaggggatcctggcagacacagtcactctcaggcagcagaacaactgtgccaggcttttcaaccatcagtgttctagaaaagagacttagggacagaatgcctacctgcaattgtgaactctggttttcacaacttagctgtgaagttctttttgggacaattagagaaatgtacatataatttgagaattagatgagaaaagtacttatttaaaaggcagatatcaactgtaaaaaaatgggaagaatatatactaagatattaaaaatggtaatccttgtattgtgggaatataatgtttttactttttatctttccttgtcttctgtacttttaattttctatagttctcggatttttcttctgtcaaaataaagattattaaaaaataacaaatgtcttaaaaaatttaaaggaatgcatctcatctgtcactatcaactcacaggaattgatatttaaagatgatcacacatttcaggatattgttgaataagattgatttgttatgcttatgagcactgcaagtaagttcatttccaagttcagtgaattgataatttgtgaataaatgaagccaggacctggactgttctttgtaactagtctggagatagctcaagtgtcaagacatcaaaatgccttgacttctggagcaaaaagtaaacctagatatattcagtaatcagatattttttcctgtcctgtatctcctttcaagtctttagagtgaagaaattaaagttcagattgctgctacagcagacttgtgtgagtaatcataaactaattgaggaaaaagataaaatacatgaaaatggaatcaataggtaaaattccaagtacgtggacaaataagttttaaaggtattctcaggaggagattactgtgggacagaaaagataggagaaagtatcatggggaatagcaaatttagttaggtcttgaaggagagacacacattgaatttgttcattacacaattatttattaaacaaataatgaggccaggtgccgtggctcatgcttgtaatcccagcactttgggaggccaaggtgggcgaatcacttgaagtcaggcattcgagaccagcctggccaacatgaagaaaccctgtctctactaaaaatacaaaaattagccaggcatggtggcatgcacctgtaatcccagctactagggaggctgaggcaggagaatatcttgaacccaggaggcggaggttgcagtgagctgtgattgcacatctgcactccagcctgggcgatggaatgagagtctgtctcaaacaaaacaaaacgaaataaaaaacaaataataagtgacaggtgtttttgtaggtagaaggagtagggtaataaacaaaatagataaatgcagacacaaaagaccttccattacgaggcttgagtctatgtttgtctattgcgttcactttcttttacaggaatatcttgggaagtttgcattccaatataggcatttccttgcttgctttagtttagtttagtttgcaggtttcatatggtgagtaaaaggcacaggcattgaaatgctctatctatcacttactaaattgcattactctggacaaaattacataacttcagagcacctacgcgccatcaatggtaattacacgtacatcacatggtcataaggattgaattaagttaagtgaatttaattaaatgattgaattgcattggtagaaaataatttttcaactaatggtagttattcttggacataaatgataaaacaaaggtaatttaaaataagacaataagaaactttaagtatagattaaggtttgcctttccactcttcttctgttgattatattcttttactacagttatggccgagagtcaccctttatttcacattggccttattccattcaattatttgaactgacagtattggctttcttgtttgtttgtttgtttgtttgtttttatctcataggttttctgcacagaaaatgaagctttcttgcttccggtgtaatttaatgtaaattctatgatgaatccacatgagctttatggagcaggactccgatataacaccattatactgacctacagtgccaataactagatccatacccaggagctcatttaacagagctctgcattggaaaggagagaaagtaacctttctaggtttgggggagaaatcctttttagttattcaatttataacttgtacatacatggtagatgcccaggaagtattacagaagaaaaaaggaaagagaaaaatctaagggacaaatgctagatgcagctgactgagaatcagcacctggttctgccagggtccttttccatgctacctcttcagagatcaggaggagctgtgtgatctgtgcaccggggagtaaatcttgtttctggctggttggggagactttcagcttcctgcaacaaagaactatgaatgttaactcagagaaaccagagatttggcttgatagtgtttgagggctcccagaccccagccagagacctcactgagtctaagtgataaaaacggagaagcccttgggagtttcattcttgatttcctcctggcagctgtgctgtgagttgctgggctctggaaatatcataaaaaagagcagattgtagtttcttctttataagtctggaagttatagaagggtggttagggtctcagtgctcacctgtgggggctgtgaaaagagagtatatcttccaaatgaatgaatttccgtgaatgaatgtcctctgtctgtggttctctgtttaaacaggggtgaatagactacatacactggagcagagtccttcattcctgaatattcaggagggaatgcatgccgttcttaattgtacttatcaggagagaacactcttcaatttccactggttccggcaggatccggggagaagacttgtgtctttgaccttaattcaatcaagccagaaggagcagggagacaaatattttaaagaactgcttggaaaagaaaaattttatagtgtttggaatatcgcagcctctcatctgggagattcagccacctacttctgtgctttgcagtagtgtctccccagcacctgcagcctgtaccataacctgcagccgggacccttgacacaggctagccttgcaggtgggagtgaagatttttttttttttttgtatagagggaactttctttatgacccgcatctccaaaatagaagtgaaggataatgtatctttcttatgtaatgaaactgaatttatattaaattaaatttccttttgttattatttaaatttcattccttgatgcagtttgtacagattctgagcctgtttgcccacagattccttccactgctttactctttaagaggaaagacccctttgtggtgcaggctctgagtccatgaagcaagttttctccaggctataccctcatcaggaacattttacccatttgatcatatcttcatgatgtttttgtaccatctataccattatttacttaatttaatattaaattgatgtttatgttaaatagactttaaaaataactgtaaaattgtcttcattttaccagataccatctgtgaaaccatgtatatgatataaataatatatttaaagtgctgcttatatttttcccaatataaattaaaatagcatcatatatgtaacaattgaaaaggctgtctgtatactgcctaataggacctcttgtatcaatcacactttaagaaatactgatccagcccatacccctcatttcataaatgaaagaattgagatccacaagtatggtatcatttactcaagcacgacttacagtaaaatgaaagctataaaaagagtctaggctttatgatcccttgtcagttgcttcttccaccaatgatgcaaagcaggatctaaagtttgaagaaaagagttgcgtgttttacatttaaattaaattaaaagttttatttaattgtgtatgttcaacctaggtaaattagaagatacgactacctatcaaagtagagcattctcataacttcatcgcctagaaataacaagtatttatttttcaaattttcttgtatacatatacaactacatttctctatgaatggggctgataatgtccccagtatttattaatgtgcttgcttctctcaacattatagatatttccatgccagggatcttatattgaggatataattttaaatgactgtctagttttcattatatattttttaaaaagtgaatcaccttttgataatatttctaattatccagtattatagacaatgtttttattaacatcattcaagtcacagctttcacagaatggagttgggtgaataagggaaaacacataacactgcatatctaattttcaggaagaaatttttcaccaaattgtgattccaacaatagcatgtaatgctttttgttttccatactttctttacctgttatgaacattattacttgaaagaagtttccactttgccaagtaaaatttttaaatgttttgactcttttactctatgaagttatacatttgttattaaaaataaatgaaacaggattagaaaacatacagagtaagagtgtttcacacaacataagtatcttcatacaataagatatgttaaagaagaactttgaaaaacactctcatggtcccatttaccttccaatgttctctttcctttcaaggctatctattctccacgtcgttcctactgtaagtgtggaccagcactatctgaacttgtgcggaatctcaggctgactgaatttgaatctgcattttaacagaccaaccgtgtcattctatccttcaaagtttgagaagcacccctttcatggggtgccagaatgattttttacaatataaagtaaaagctgtctctactagcccaaaaatgcttcaatggctttctattgcttctagaataaaaatgcaaatttcaggctgtgctacacaaagatatgtatcatgtgaacctccttttcaatctccccttttaactctcctagctctctatgtagcaataacactattctcctttcagtattctgaacttgccatgttcttttccacatttagtcaaactcgtccatttgaaatgctcttcctccaaatatgggcaagcccaattcattttcacatttcagatctcagctcaagtacacactatatagataaagacttctgacttctgttgatcttcgtgactaacgtagccatccatggctctccccacagctttatcacaaaaccctagttatttcccttatggtaataatcataacatctagttataatgttgatttacatgccaatgtgttcattgcctaaacttccaattaggatacaacttctatgaggtcagggatattgtttgtttaatcacacctttaactttagtgcctacctttagtgactgccccataatagtcagtgaaaaaatatcttctgcatgtggctgggcgtggtggctcatgtttgtaattccagtactttgggaggccgaggtggaaggatcagttgaggtcaggagttaaggaccagcctaggcaacatagtgagaccctcatctctacaaaaaacaaaaataaaatattaaatgagtgtggtggcatgcgcctgcagtcctagctactcaagacgttcagacagaaggatatcttgagcccaagagttggaggctgcagtgagctatgatggtgccactgcacttcagctctgggtgacaaagcaagacctcatctcttaaaaaataaaataaaataaaataaaaaagaactatatacagaatgaataaatgaatgttgcttggccttgcgttcttttttcctttcgctttcttctcactcccatcctagcaaatctgaacttcgtgtatgtgctccctgctcagatatctggtagagttctttaatgctggcacttaccccttgtctccggaccaggccttcctatgctcagtgaactctgtcaaataactagatcaactcagggtctcaatctgtcctcactcaattgacatcaggtgtaatctgaatgaaccgagcaaactctaaacataatcccacagtaaaacatctgaaagaaaaaaaaggtatacttaaaagatgttggaaagtatgaaatcaacttcccaaatcaaataaatgataagcacatgtcaaagtttaatctcaaattattgcaagagaaaaattgcatcaggaaacacattcaaataattggactaagtagagacattttatagaaactaggtttttttttaaagtcaatttaaagataattattatggtcaaattattattggttcataatgactgtactctgtgtagtggttgttagactcatcatgagattaatagtcatctgagattataacactaatatctcagaatgagtctttattttagtaaagaatatcagaaaattgatcaaatatttgatcaggtatgatagttaattcccatatggggctatacattttatccttcaaaaaagtttcattcaagaccagttttgggaaatttattgttgtcaaaagtaattcaaaccaagtgtggtgatgtgtgcctgcagtcccaggtactcaggaagctgaggtgggaggatcccttgagcccgggagttcaagtccaacctgggcaatatagtgaaacctcttctgtcttaaaaaaaaaaaaaaaggtaattcaagtctttagtctttactataatggagaggagggatttgtcaggttttggatgttttcccttcctacaagttactaatcttgtttgattgaggctacagtaaatatatgaaactacttagagacaaaggattttgttactcatgacacagcaaacagcataaacattgttatattcacttcagtcgttctttcccttaaatctaaaaaagatgatatgtatgctgacgaatactttgtttgaagtggtactgtgtcataactgaggaactttgagctcggagaattcactgcttttatagtaaggagtaaaccaaattgctctttgtctcagagggaaacagtacctcacccctcaaggtttcttgctgcaagcataactctggaaattggtcaggtagagtggtcatggtcgtaaaccactggcatacctagcaagacatttatgagtataagagattaaggatggtctggttttcaacaatatccactccatattcttacattgtgttattttctagaaacttttctcatgagtgtgccactccagaagccgttctgatcaatttgacagacagagattccgagactaaatacattgaatttgcctcaaacaatgtttaaataaggctactatcagcagaccaatctgcaacattaacttcacccatttagtcagctgtgacaaagtcccaaagtatagataactaggatataatttcttatccattatacatggaagtttagattgatacgctaatctttgttttaattctcaaaaagagtccaaaaagtagccaccattcctaatggaaagatgttctgtcccacctattcccagacataagcataacccaacaggttaatccagtttggaatttattgttaaacttgatttggatcagcattacatcacttttgttgtaggatccttggggtgttgcttttctgaccagaaacctctgtggttggtggtgcctttactcaagttttgcatgggccccctggactcattccacttacttggcctggaagactatgctcagctcatgctaccggcctggatcttatgcttgccaagggcgagtcaggcatggagcagtaagggatgtgtgaggaagtgtggggtcttgccactgcacagtcagacatgctggctgctgcagtgaggtgggcagtgctggcatgggtgccagctgtctacaagactgaggctagaccagttgcactgcaagcagcattgactgctggcactggggaacacggtggcactcaaaagcttggagatgccaggaaccatagggtcccaaagaggggggtcatagccctgacttggggagctctcaggtctgggcttcccacagggccacagcacttctctccttttttttacccacaatgtggcaaacacgggacatgtttcagccctgtttgtggaacagctcttttagccccaccatttgatgggttccaagttcttgtcctgcaaccaggaagaatgaggtacacagtcaagtggagggtgagcaagatgaagtagagctttattaagtgatagaacagctcagaggagacctgcattgggtagcttctttccacagctagggtgttccaatgagtgttcagctcgtagcagagaggagaccctggagtgggaaactcctctctgcaggcaggctgtcctgttgtctctgtagctctcagcacagaggaggccctggggtgggtagctcctctctgcagctggttgtcccagtgtctgcagctctcaatagagaggaaggcttgtagtggttagctcctttctgctgctggtcatcctgaggtctgctcagctctggctgagcctggggcttttatgggcctcagaagggaggaagtgcatgcccaatttatccatgggcagccatgggcaggcccagaaaaggcaccacaagttcccattccagtctgtgggactggcagcctgacacccagccttcaggccctccttggcctgaaggtgtgacctcactggggacccaccacttccacccagaaacctgtctgcctcctactgtcattcttagtgcccagatggtaggtgccaaggagtgccttcaggccagtgcccccttggcttccctcttatgcttgtcagtgcccaaaatctggagggtgtcaaggtggcagagggctggtgtgtgaacacttcccctagtgtgtgcacactctactgtgctgcaacagtgcctgggcttggcctcaactttgctctgagatcagagtggatgctgacaacaaggagaagccaggcagtgagagtgggtacttctgagcctgtgaaggcagggagggcttcccaggccctcaagagtacagagaagcctcggtccacagctgcagtttgggaagctgtagctgcccacagagggaggttgagggggcaatgctcctgcctgccccatggagcagaagtcctgggtttgcagccttgacttgggtggctgcagcttcactgagaagggtggggctcctgcctgctcctggtttccccaagagcatagggaggcctaggtctgcagtcacgacttgggaagctgcagctgtgcctggaagggcagggttccctcctgctcctgggcagagaagacagtgatgcccctgaagctgtggcttgggcagctgcagggcacctggggagctcctgctccaactcagaaggggcagggctcctgcttgtccctggttccatggagtatgcagccccagccatgcctccctgctgtgatagtagtggccactccagatggcccgctgctgccatcacttttgttaagctatatgagcagtgccattgagtatttgcaacctctgtagccattcatggcataacccaagacttttcagacatcaggagaagcatatacatttgtatgagtcagattgagacaaagttgtactgatttctatgtttgtacacagacaaggatgaagaatctatgttgggaagctgctattgatgtatgtattgcagaaattttcaggacaggccatattcacaggagttttactatttcaaggaatgtggaagaagatgacaaaccaagagcagattggatagccagctgcagctgccgcttggctccagcagaccatataattgtcttgctaggctgtggtgcttgacctagaatacaaagagtgaattaattctccgctcctccacctcccggtctaagattttcccttcctaggtgccagtgttattgctctttgtccaccatcacaaaatcggttcatcccattctagtagctataactttgccttttttttgtagtcagttcctagtcacaccaaaatcatttgcctagaacaaatagaaagaggaacaggcatttgtatgacatttacagagattcatcataattaccaccttggccttcctggaaaactgaacgggaacttgtaaagctgtgcactcaaataaatgctggttatcctcatgatgtaaaatcatgtttaaccaagaaaagaatataggtggctgaactggaattcaatattaataccattctgacaatgttgctgcctggagagtgtaccaaccaggctgttctaaggtcgctgttcggagaaagaaagaagcatcatgcctttcacttctagaatgttagaggaggtgtacttttttctattactgttagatacagctaaaaattctggacattatagatgttccttgaattgaaatgagattacttcccagtaaactgattgtagtttaaaataccataggtataaaatgcatttaatacatcttatatactggacatcataagatttcctatcctatgttaatcatgctcagaacacttacattagcctatggttgggcaaaatcatctaacacaaagcctattttataacaaagtgttgagtatctcatctagtttattgaataaagtacccaaagagaataatagaaaggttgtattggtacacaaagtgcagtttgttctgattgggtattgcttttgcaccatgaaaaaaatcataagtcaagtcatcattaagttagggaccatttgtatataaaatcaaaagataaaaagtttctaaaagatagagagaaaaagccagattgtctaagaaatttaggacctgaacaatgctagaacagtgagtttcatgagtttccttttgcctcatacaaaccagtggcatccaggagtagccagtaacctggtaatgccggtgggtacagaaaagaaatcccaaagaaatgccgttttctgtagccaaaggaccagggaaaggattgactatgaaggcagaaactataagaccataaccattctactctagccaaagaccacaaaaagttttatagcaaccaagcatacatttaatcaacaaaaagttaactgcaacgtagcaggagagatttgtgatagtgtaactttcttttgctccatctttccatcactggcttgaaaatagtctttaaatggcatccggcattcccagtgtgggtgtctggggctggaggaagcagagtagacccgttatcaaagaatagtgcctgactatgttgacctgtcaggtggttttctgaagggctaattcaaagggctttcctgtattcatataactcaaaaccctctcagagtggagaagaagtggctatgcagaggaaattttaaaaaaaaattgataaagggactcagtagcaggaaggagaaagaatctgcaaatgtgaagataggccaattgaaattattcagtctaagaagcggaagggaaaaaaattgaagagagcttaatagacctgcgggacattataaaaagtacagccataaggataacaggatttccagagtgagaggaaaggaaaaagcagggagaatatttgtaaaaatcatgactccaagcttcccaaatttgttggaagacatgaacctatacatccaagaagttcaacaaagaccaagtagaaaaaaggcaaaaaaaaaaaaatctcattgggacacattataatcaaactgtttaaagaaaaagacaaatggagaatcttgaaagctgcaagagataagtgattaatcacatggaagagatcttccaaagattagcagtctattgtttatcagaaaccatagaagccagaaggcagtgggatggcatatttaaagtgtttaaagaaaaaaaaatgtcaaccaactattttgtatcaggcaaaactattgttctaaaacaaaggagaaattaagacagttccagataaacaaaaactcagagtattcatcacttgcagatttgccctacaagaaaatctaaagggaatctttcaggcagaaaagaaatggcactagacagcaacttggagccatgcaaaaataatgaacaatggtaaaggtagttacatagataagaataaagccaatatttttgtagtttttgtttgtaactcccattttttccctaacttatttaacaaactaatacataaacaataattataattatattgtggaaaattatacagaataatctcattgtgtataatgagaacacaatgagtcaaagtgtgtttttccatgtgtataaaaatttcctttgtcgccgttgtaatttttaacagcacaacttatgtatttcaaatagacacaaaattagtagcatttacagtagtatcttaagataaattgcctttgaatgagatcttgctttcaatactttgatgtccacaaggcatatctagaaaattttatgctttggaagatgaagactgcttaatccaacggggaaggggactatgatttctctttgactagttgccataacactgtccttaaggcatatgaaggacttttatatgttatttagacatcagtaggcacagaagctttgcagtacaactttgacatataaattctgtcattttttttttactttaaaataaattttttttttaaatgtcactttgctagcattgataacgctcttaggtccaccacaacattatatctattcacccatactatttttgttacaaatgttaaaaaggtgatttcttcctgaaaggactgtgcttcaggtccccattcaattttagatgttatatttgttttttataaattttccaagaatgtagtggctgcattcttgggttgctgtcactcttcctttggtttttacacttactgagaagtggctgttgtaatttctgtcatgtgcaatgtattcctggaaaaagggatttcaatatcagcatgttattcttcattctatttcctatgcagttgttggtgggaatgggaagggcctgcccaggccatcattgatgtatactgattacaaggctcttgagtagaaaagagcctgcatcattgctggcctacagccaccagcttcttcaaggacacagagcagattatggactagaggaggaacagtggttgttgtgcttgttactctgtagacccagttaagtttcttgcatagttaaccctccatagatctggtttgctttttaggttaggatgaaaaggcaaagagaaagaccaaattcataaattttggagatttattcctagatataaacttaaaacaagaaaagaaataagaggaattagacaaatgaacagacatataaaagtctagatagtgaaggtaggtccatctcttttgcaacagcccaaacaaatactgttttgacatgacatgcacatgtcattggtgtaagacagaatgacgaattccaagctccagtccttggctttgttaaaaaatgttggccaggctgtgagctcaaatcatatttctttatctagattttaggtcattctattttgaaagaattcttttgaattataggaaatttctttaaaaattggagataacagaatgctatggggatgtatggcctgacatggagaagagctacgtaatgtgaaatgctccttaaattgcaagaatctcactcaaagttttggaatagaatgcttcatgactgattgttgtgtgcaggaaagtggctattagaaataattcctcttactcatacaagagttgccatttgatatcaaacacatgcatgcataaacatcccccacagacattgacttggagcatttgcttctcaaatttttaatttaactaatatgtcagatttttacatttacctgttcacataatacaggtctacatcttgagtacgtctttgattactatcatgattccacaagatggcagtgtgttcttagggaccctgaggaaagctctcaagtgctcgtgtgtgtgtgtgtctgtgtgtgtgtgtgtgtgcttgagagagagagaaggagagaaagagagagaatgggaagggcgataagaggaggggttagtgatataccaggggttgtgaaaataacctcttttttctaattggtaggacagattctttttacgattcctaaagtggaagaaataaagtatctctgctatgttcatttctttttggattgaaaattttaatcctcagtgaaccagggcagaaaagaatgatgatatccttgagagttttactggtgatcctgtggcttcagttaagctgtgagttgggcatctctataggaacataatgtacaatattttgagatattgtctatcctaggctgggggctagaagcctgaattttttctctaactaagagagtagaaagcctgtaaaaacatgatttgaattctggggagtaagcatttacctcccaatttgtcttctctgtctgaccactgtctttttcacaggggtttggagccaacggaaggaggtggagcaggatcctggacccttcaatgttccagagggagccactgtcgctttcaactgtacttacagcaacagtgcttctcagtctttcttctggtacagacaggattgcaggaaagaacctaagttgctgatgtccgtatactccagtggtaatgaagatggaaggtttacagcacagctcaatagagccagccagtatatttccctgctcatcagagactccaagctcagtgattcagccacctacctctgtgtggtgaacacacagtgctccccagacacctgcagtctgtacccaaacctgctgggccccaggaatgcctgatgtagagcttagactgcagggcagtaaagtcctctttgctctctagattcaagtggaaattaagagtactagtatggaggactgattgattagggaagtattattataattctgaaaataattgagaccctgaagaaaaatgaaagatacagtcttggtctggttaaaatattttccagtattctctttctactttagttttaaaatattttttatatttcttctggagagattaaaaaaataaatttttttgagatcattgacaaaccagaaggtttacatattcatttcatacatacatcacaatctatgccataagcatatccatcatctctaaaagtttacttcctccctccttttttaaaaaatttaggtatgattgatatacagcaaggtgcctatatcacataatgtatacattttaatgctcactctagttttatgccacatctatgctttattagatcggttttatgattccttttatttatatcaagaaaacattttcatacaataacagatattctgtctctgtctgtaggacatcttattctttccccatttagttacccaagaagtttgatagacgttgctttaggaatgcaacagaaaaacacaaatgcaaaataaaaaagatcagcaaactactgtgaaaatcctgtaagtcataaattcttttagttatagaaccctcaccccatctccagccttagctgcagctccactcctgagttatataagggcacatttgatgagtagatggcagaactagagggagagggtgagaacacgttaaaaaaaagcctagatatttgcagagattgaagattagagagggtctatattgccattttggggtaaagtctgaattgaactcaaaaccttgtggaagagtatattgatttctatgtaactgagtgtggcttggagatggtagggagtcttagctctagtcacagcatgtcatatacccacagcacctgctggaatgacttaaaatttattgagaaggatctctaagtatctaaaagaagtctagacaccaagaggctttgttgtgatgaacaaagacctgtttaaatcagtgaccagagaccgtatggtattgagcatatttcagcaaatgttggaggagagttggaaacactgaagagcatataaatgcctccctcctctgactacctagcaatacatatttgccctgcaatatatactatgttcgggcaaaatatttgtgcctgatgaaaagaatactttttagtagctattaagttgaattacaggaaaaaactttgaacatcactttattataaaagtgaagttgtagtctgttggacatgatatagtttatgtagtcctcaaagtgggaaagtttagaaatggagagttaagatttctgtcaagggttgttcccatagtcactgatgaaaaggatgaactcaatccaaatttgcttcaaattcttaatctgaagaatgaaagactgaataaatctttccaagccttggaagaaagatttgaaaggcagtaaggaagagcagaaagttgcgccagaatcaagacccttaaattttacttccacatttgttttataccttttggcttcctggcattctggaaagaacctgggttgtgttttctgtttgaatatttatgttactaatggtccatttattaggctacatactatatatatttcaggatttgtttcagtattaaatgagataacatactgctttgggatgagttccttaaaagtagagactgcagttggaatctttctctgtaattgattgaggaaaccaggttgagacagggggaaaggctaagcatggacttggtccagtgggagtcttgatcccacctgacctcatagggagctctggagagtgaactacatcacaggggtgatccctcccacgctgaggcaagggagccagactgctctgacctattgtgggtaagaataaagtcataattggctgcagtgtttcttggggtagaggtatatgctactggacaatggtggctctcattggcagaggtcaactttctagggaaaggggcaaatgtgagccaagagtagccaacactcacagtagcgggggatggctacactgtcctgggaaaggagatctaggctgggggccagcagtgttcgttattaccagggaacttgcctggtatgtgggcagcattcaagaaataataaactttaatcatattctgaattttaatttcactctccttttgaaggtgtttatacagctggccttaccaattttgaggagttgaaataatgtaagttaaagcacttgttaacagaaaccatctaagtaaacataaaaagcagatgaaaggaaaaattttttcaaagctaaaattcagaaatttttaaaagagtagtgaccagagaaccagtctactatcttagttgcttttgggaatgatgagataacattctatccatcactttctatccaggtagcaatgattctgatgatttacagttcataactctgggcttctatgtgtagacagagataccatctatatttatacatgattaatgctattttgttattaatttgtatttaagaatgaaggactgggtagcaggatggactccttatgtctttgtgtccatgttccccacaaagtttcttcttgaatggggtgcctggccagtagtgtgggtatgtgggtctgtcatgtgaattgacaggcttctttctaggatgaatgaggagggaactggtaattaaggtgcttctctttgttccctgaacctaatatcattggaaatggcctaattatattaattactcataataaaaactgaaaccatcccagatggctcaagtaaactctcatgaagattacatgccccaagttggcttcatatgcttctcacacacaaatacagaagcaggttggtgagaacagagagaggctagtgcagccattccacatgtggaccttcactacgttctcttgtgttctgttcctctcacccttcatcacctgctctctttctcagcccagaacctctccagggtcccacccagtaggttcccttcactcacgtttccactgtaatcttctcacagttcattctggcctggactttttccctctctgttttctccatcagtgtatttgcatccactttttatctacctcatgggaattgtgataactttcatctttttattagttttattattgatggattcaggtcattctgtttataattttacatttcatttcagtgggaattttagagagttaagaggacagcaaatatgtttagtttgaagttttgtttcagaaccccaccctagtaacatttaaatttttaagctgactatataattttgtcttacatgtgataaaaaatttataggcagaatcaagaactagatcagaagcccaagggaaaactgatttcaggctggtacaattcaatggagtattcagaaagcagtttttgttctgaccttgtaaaatcccattttacctgagatttttctccttactgggttatttcatttttaggatccaatgatctctatgctacaatagattgggtggggaaggctttttgctcaaaagcttcattttattattggggcacagagcagtctgttcttgttcgctattgtctcccacccacatggcactgctgtttgctttgctctgttgagcgtcaccgtcaatatctctcaccatttctacacctctcacaggttcctctcatttctggtctgctgcttgcactccttccacctgtattgagttcatgtaggtttactttttaaaaatctctttaactattttgataatcacttatttatatgttatattttcttccatttatcattctgttcaagtttctttatagatggagaaacttaattgtggagatagaaaaactgcattaattttttttagtggcagattctcataatttggcacaatatatcagtctattctgaacactgacagttggaatagtactctcactttctctttttaaatataagttatctaaattattttctcctaggttcacaaatattaaacttgttgacctgaaattaggaagtcttttccacactttccacttgacaaagaaaattcttgcctttaatcgtttgctttgattaattaatgatatgtgatccaggctgactttaagtatgagtctctgatctaatttattttttaaagagtcaactaaaggaataatctctttcacccactgtaatgctcacatccagctgcacagggccatatgaagctcagcccagactgagacaactgatcaccacccctcttcttgatgaacgactttactaatatagagtgtctcaatggttttccaaagtctacaacgttgtcttctgtgactaatttctcagggaagtaaattactcttctatttctacataattctcatttctcatgtatttaaaattaaaaccatatactctacggaagatgacgtcatcacagattcgggaagaaagaaacactttctgttggttttgatatcacatctctcaaatgagaaggaaacagttcacttccttggatctgtggttccacctgtgccctccagggggcgacgttgcactaaggaggcatctgtgttcattgccgaccatcctcatccactgagcctcctccctgcagctggctgatgtagctcactgatgtctgtgtagatagggagctgtgacgagagcaagaggtcagaacacatccagactccttaagagaaagcctttctgttttggaaacttttcaaagccagggacttgtccagcccaacctccccattgctcctagctcccgaggctcaggacccctggcttctgtcctccctgctcagggtcctgcagcgttgcctctgctcagccatgctcctgctgctcgtcccagtgctcgaggtgatttttaccctgggtgagtaacattccattctttttcctccttttgtaaatgtgactgtgttgtaattgcctctaagtagacttcttagcgaagtcagcgctgcttttgcttacacagcattggtgttgcaggaggaaccagagcccagtcggtgacccagcttgacagccacgtctctgtctctgaaggaaccccggtgctgctgaggtgcaactactcatcttcttattcaccgtctctcttctggtatgtgcaacaccccaacaaaggactccagcttctcctgaagtacacatcagcggccaccctggttaaaggcatcaacggttttgaggctgaatttaagaagagtgaaacctccttccacctgacgaaaccctcagcccatatgagcgacgcggctgagtacttctgtgttgtgagtgacacagtgcttgagactgcaggagagctgaacacaagcctcctgagatgctgagactttctgtgactcaagaactcgaccttgaagtctgttttataatattaaatagcaattccaagtttctgatgcttattgatgtgtgctgtatctttttcatctatttatttttaaactatctatgactttaaatttaaagtgtgtttcctttaggtagctttatatataaggtctttctatccactatgtcaatctctggttttgcactggctagtttagataattataatttaatgtatattgatgaaattggattttagtatactatgttattattgtgtttctgttcctcccttattttttgttgttctttttttttgctgacactttttggattatttgaacatttttaacactattttaatctatggacttctttggttatatttccatattttttgagtggttgctctggagattataatacatatgactaactctccagggtcttctgtgatgttgtacctctttatgtaaaatgtagaaatttttgtataatatgtctctttattatacaataataattgtctcttcaacaaacactgaagtttgttgtagtcgttcatgtatatcaaagctacctatattggaaagctcaccatataatggtacaatttttgttttaaataattgtatggaccgtataaaactcactaggaataataatatttcgtatttaacagctatttactaactctggtatccttcctttgtttctaaagtaagttttcctctgacaccaggagatgtgtttgaactgatgtcattcccttcaaacttaaaaaactccctttaacattttttctagagtaggtttgctggtaatggtattttttagtcatttgttatctgaagatgtctttattcttaatttgccctttatttgtggaagatatttttactgggtctgtaattctgtgccaaccattttcccccctcactttaaagatactgtttcattgtctgctggtctccatgttctggttagaaatctatggtcattcaagtaattgttccccaatgatattaatatgttgtttttctctagctgcttcatatatatgctatttgtacacacacatacacgcaagtaaaatcatatcatcttttgttgtcctcagtataattatgatgtttacatgtggttccctttaatttgttcctgtttggggcttaaattcataagtttgtctttctttgaatttggtaagtttttggccattcttctttcaaatatgttttctggcgcaatctctttctcttctccttctaggactccattagttacaacttagactttaggacactttcccactagctctccatagctctattttgttttctttcaatttttttcttgattttaaggtctgcctctactcactagatccctgtagcattacataccccatgttgtgacacccaaatttctatctagatttgtcaaatgtctcctgaggggagcaaagtcaaaattagttaggttagataacctatactggtctattttcaagtttgttattcttttctctatcactttcattttgctattgagcccttactgtgacattttgattttggatattgtatttctcagttctaaaatctcctttttttttttttttttttttttttttgagacggagtcttgccctgtcacccaggctggagtgcaatggcatgatctcggctcagtgcaacctccgcttcccgggttcaagccattttcctgtctcagcctcttgagtacctgggattacagttgcgtgccaccacccctgggtttttttttttttttttggtatctttagtacagatggggtttcaacgcgttggccaggctggtcttgaactcttggcctcgtgatgcgcctgcctcggcctcccagagtgctgggattacccatgagccaccatgcctgggctaaattttcccttttttaactttgtggtacataatcaaagagctactttaacgtctttttctattacttctagcattttagtcatcttgacctttcatctgttgatcttttacttaaatattagtccacttttctgatcctttgtatgtccaataattttgaaatgcatattaaacattttaaatattaagggtgtagactctgttttcttcttctccttctcatccttattcttctttacaaagcattcctctgaagaattttgatgcttttgctttagcaggaaatcaacctagtttggttcatactgtaaattttctcttcccttttgtggaatttggtagctcaaaatctcagttcagttctctaatcatttgcaatgttggtttggatttatccaagtcatgtgtagcttagggattagtgtgaaacctgtttgggtggctcaaatatcaggtcagccctgagctctctgctacattggtttttttgtcctgcattggtgccactcaggaggtagtctgagactgaaatagtggttcaaatatcagttgaataacccaagctttgttgatctggtttgagtcagtcccaggtacatggagctttgggattagcctgagacttgagctgttttccatttcttccttggggtctgtcttttctagcctggtccacagaggcagaaagattgtgtctctttctgcacaatcttttggtctcctgcacaatcttccgcacctcttttggtctcctataccattgttattgccaccctaccatacaccaggggcctttctaagggcaaagacaagagagaaaaacaggaaaaaatatgaaataaaaggcttgcacaagttgcttctccaacgtttgattttgtctgctttgagtaatttcagaggccacagatagttatttttttgtgtgttttgttcagttttcacttgtaacctgtaggagagatgggctgtaggcgtcttaaagctgtctcctattttactatgttcctgcattaacttatggtctaccataatatgcatcaagaattgctatttgatattttcttttcccacttttattttttattacttctttcagtcaatcttattcattttttatatatgtacttttttttttgtcattaggattataagaatcatctaattacggtcttgattctttggatcttttttctccaaactcacgaaagtctttctttgatgctagaaaatgagcctgtgcacttgtttttaatatgagcttaaagaactattttccccaaaatataaaatcttctggattctgaacaatatctgaacccaagagcataataaggtgtgatacgactatccaaagactatgcttttccagtacctaaagcagagctattttattttcaattttctgctctctctgtgtttttcatttctgaattttcacttattttaaatggaccatgcattttgtgatttatttatttatttatttatttatttatttttttgagatgaagtcttgctctgtcgctcgggctggagtgtagtggtgcgatctcggctcactgtaacctctgcaccccaggttcaagcaattctcttgcttcagtctccctatactagctgggattacagacatgcactaccacgcccagctaatttttgtatttttagtagagatgggattttgccaagttggtcaggctggtctggaactcctgaccttgggtgatgcacctgcctcggcctcctaaagtgctgggattacaggtgtgagccactgcgtccagcctggaccatgcattttggtattttggggtgtgtttggagactattcaatctccctgacaatcaatgtatttcttcaaatgctgtcaacatcctccgatgagagcattctatttctgatcctattcctcttcaactatgagatgttgcctctaaatcaatagagaattgagaaattcctttgcattcttttagtgcagagcaaaaggcagtattccaaggcatcatacaatcctgtctttttcactttgaacacactgggatttgcaaacacccagcaactttgagagacattaaaatcatcaccagcctgaaagtcagcagaaattgctcctcatagtttattttgactatgtttttcctgccctgactttaaacttcactgtgatcccatctacttttgtcttatggaaacatggataaatctattctttccagatgatctttgtttttactcttttggattttggtttgttctcatttatatttctatttttttagttaggaagaaatttggtagatatgggatgtgagtatatagcattaggaatctaaagtccacactcaaagtctatgtatttacaaaatgtcagccatactctttctacacaaaaaacaatctgtacaggcagtaacaaatgaatcaagaacccaaggagagaactggccacatgctcctggaatcaaagaaaataagtattctgactctgtaaaagattctcattggccacagagaacctgtcgaatttctcctttctcttgttttcagagattgcttgtttggtgttggtgtatttccttcagccctagaggtttctgtagttgcgtttaccttagctctaggggcaaagcctttccatcctgtgttacaccttgtcattagtcatatagaggcactactcccattttaagggtcccgtcttttactctatggccgcacaagcatcttccaagggaaatatctctatcatcctccaccaccaacaaggcaactctgaaccatcaaaaactcatcccgaagcagctagtctgcgtccaacgattctcagaaacacagcttaattctgatatatttttaaaacctgatttctcaatgaggtaacgtattactctatttttacatgacatcttattgctaatggactataggcctaaaacaccgtcatagacttgggcaggaagaaacacatggtgtggatgttttgatacatctcagaaattaggagaaacacactaatgagctctctctgctaaactggttctgcacttggcctccagagggcgatgctgcacacactggagcttttgtttctgttgaagatcaatccactgctcagtttcttcttcctgcagctggttgagttctttccagacaaagacaagtgacaagaattagaggtttaaaaagcaaccagattcatctcagcagcttttgtagttttaaataagcaaggagtttctccagcgaaacttcctcacacctcttggtcttggtctcttcagacactttccttcctgttctctggagatcttgcagaaaagagcctgcagtgtttcccttgttcagccatgctcctggagcttatcccactgctggggatacattttgtcctgagtgagtaaaatttctttatggtctctagttccacaggttctgactagaaatgcttgctttttatactgagtctgcactgctttcactgatagtacattgtttttccaggaactgccagagcccagtcagtgacccagcctgacatccacatcactgtctctgaaggagcctcactggagttgagatgtaactattcctatggggcaacaccttatctcttctggtatgtccagtcccccggccaaggcctccagctgctcctgaagtacttttcaggagacactctggttcaaggcattaaaggctttgaggctgaatttaagaggagtcaatcttccttcaatctgaggaaaccctctgtgcattggagtgatgctgctgagtacttctgtgctgtgggtgccacagtgcctgggtctgcagggggagctgaacacaaactgcctatgctagagaagttttcagagtttcagtatatctccctgtggtgttttcaaagatctccttttttatgatggcgaatgaggcaaagagggctaagccgacccaggcatttctatgtaattctgcagttcctgttatgctccatgtcctgataaattttgtttcagaagctttttgctcattgtagaaactatataataggaaatagtattcttgaatgatggaagagatagtattcttataacaatcaagtcctccatgacttaccttgatgttgtctgcattagggggttgaccatgtgagctgtgacatggcctcagagaaaattggttttcatttataatttcatctgtcatctaatctggaaaatagaagatgattttctcatgtttttaccttgcaaatttgttttcaagttggtcattcataggttattttttttagagtttctttttttgcctctaactgtggtatttatgtgtctaaatattttgtctgagtttaaataactctatttaggaagaactgtgagaagttattagtcaacaataaaagagtcattagaatcatgaaggacttagaaaaatgtcaggtgatgttagttccgacaactatttaagaatagtgcagaagaaaaatgaagattaaaaattcatcagtgtttctccaaatactttttcaccgtgagaaaagtagtttcctattcttttagtctcagaaatgctgcaaatctgtatcagaaatttgtggctataatccctttcatttttcttctagctactggcatttctattcattgctttcgccctgttgttatatgatttcagctattggaatattaaagatggattcttataacattttgataatcaatcatgtgataagtttagcaatgccaaactgtgctggaaacactgataagaattacaatgcatggtagagagtcactggacccagtataaatttatgactttcttttgtctaggatggaaagaactgttgaagaagcttttatacttcttgtttgcttgaagccttggagggtagcaagtagtctggagaaaaaggagaaggaggatgaatctttccagctgctacttggctcacgctataatgtattagagggtaggtacgtaggaaccctcaaatatagagagaataagaaaattgtggccaatggtacacgttagccaaatggtgaaccagcagatcagcagtagtttttaggacctagtgagatgattatatgggatagatgtatttcaatgattgctggatgggtataaggaaggtaaatggaacattatagatgtaaaattatgaataagatatgtactcgtgtaatgtcccctgcctcagtccctccattcttttctatttctaaagcacactgtcttctacctttgataagatggctaacttcaggtgactcactgttatcagctcagccacattgcccacagggactgtgatgggcactttatgcgaatcttaaaggaggtaggaacatagaattgttttgttgttgtatgtgtttcaaatgtatgtagaaagttgtatatagaagtcgaatagtccaaggggtggattgatttattgactctcagctccaaattcaccccttgcctcttccgtgaatgtggatctgtacccttcaactatgttccttgccagttggcataacgttatgctttgccagtagaggatcagggagaaaagattttgatttttgctttctgtgtgcacatgccacaggttcctgcagcatgagaggcttctccagcgtccggctcctgcagtgcacccacaccaggttcctgcgctgtacagtggccagcagtgtcctccagcacttccatttttgcgtggtactgcagaacagagcctgcagtgagacaccttcctgtatccagctttccccatattcatccctagattcatgaatcggcaccctagattatggttttctggtaagtatgagagggtgaatttctctgtagaaaattcacagcacaacagtgacttctgtgtcatctagtgagacacagttgtgcctttcccaataagatctgggtctcacccctggggggtgggtctaggggtcccttcttggggtgttgtacccagccctaggagtagggactgcaccttatatctgctattcctacaggaataggaatagcagagttttcttttctttgtattacctatttccttgttactctaaatcctgttataattaataattttttatattaatattaaattttcctataattataaaaagcattttctgttcaaattattatatggtctatctttcctgattggaccagatttatacatgcaccaaggatctcaagccactgaagagcatctccccacccagtcacctgacaaatctagttgcttgcttgttttatttattgctcatttgttttatttatttatggtttattattttacttatttattgttttacttatatgattacaagaaactttatgcaataaagaattacattaagaagaatttggaaatatgtttttatattaatgaaattaattttgatttttcacattttgtgcatgtttgacacaaaattttattataccattgaggcaaattataattccttttaaatgtattttagcttacaacacaaattgtctttcattcactaatgagactgtgtctgaagattttaaattccaagtcatttttcattcatctaactctgttaattatccttatttttgatttctttaaaatggagggaaaagaccatgataactttaaaacaatctgaagacagaatacttctaacacccagaaagtttttgtgtgtgcctttccagtcaacccaccttctggaggcaacagatgttcatatttctagtattacagagactttaaccgttttaaaacttcgaatcaatgggattattcagtaggaactctcttctgcctggtttctttcactcgtcatgttctggaggttaatccgtgttcattaccgtaattgttgagaagtttcctattatatgaataaagcacaatttatttattcatttggctgtgcacaccattggctgattacagaatcttttagggattaaagctttggtagcattcttttttttttaattagattcaggggttacatgagcaagtttgttacatgggttcactgcgtgatgttgaggtttgggcttctaatgatcttgtagtgaacgtagtaacctatagatagttttgcaacactttaccctccccccatctcctcccttttggaatccccagtgcttattgttctcatctttgtgtccttgtgtactcaatgtttaactcccacttataagtgagaacattgtgtatttggttttctgtttctgtgttaattcccttaggataatggcctccagcttcatccatgttgctgcaaaggacatgatctcatgctttttatggctgtgtagtattttgtggtgtacatttaccacattttcttcatccagtccaccactggttggaatttggtagcattcttggtgcaaggtataggctgtcctagatttttatatgccgttcaggcaatggtagggtgtgtctctgaagttctatagttgaaatccatatcttaaatacttttatttaaaaaccaattcctaaatttcattatgctatttaacatgtcactaatttttctaataaaaacccaatatctgatatttcctgtgctacttataaaagcttcaggtatcattcaagctgtgggtagctgaactgtagtttcctctgttgtggccttacgtgttgataacaacagtagctgaccgccttggagtttgctttcttgactaagtgaattgactctccttagagttgagacttaagttaaccagctcatgcttgatattctgtggtttctgttgaaaagatttaatgtaaattatataacctagcactttagtatatttattcttacttggtaacatatatatatatatatatataaaatgaacaatattttgataagtgttcctgcaaatcctgaagatctataagtcatgtaattataatccttgctcaacagtcattccagagaactcatttaatatttagaggcattttgctatatacagtacatatgaaaatattttaaagcttgttaggtaacttataaaggaaatttcgctgttatttaatatcacatatgcagcacatccaatacaaatttccaatcgtttaagcacaataataaagttgtcaagataattagaggtctgtacagaattctcatggggatatctaagacaagggagcacttttattcaggaaacaagtgcaccaaaacatgagtgtaaaaggtagaatgttaagatgctgaagatactttatatgtatatttatgacttcaagttgctctgtgtgatatatttcatataactggatattaaaaatttaccttcacattaattttctagagctgccatgacaaataccacagacggggtggcataagcaacagaatctgtttttctctcaattctggagatagaaatccaagattaaggcattggcagggcaggttgttattgaggcttgcagatggttgccttctcaccgtgccttcaggtggtctctcctctcatggtgcacatgtctgtatctggatttcctttcttacaagaacaccaattatgttgagttagagcccagctatataacctcattttaccttaatgacctctttaaagatcctgttttcaaatacagtttcattctgatgtactggggataagggcttcaacatgtaaattttggatgagacacggtttattctgtggcaaccctccagggaaataaatatcaaattaatgaagaagacaattaaagcctctcttgacacaacactttgctaattgctggcgcacacaatgatcatatataattttgatgatgaattttccctgctttcttttgtgattctagagcaattagaaatgtgcaataacagatgcagatacttcctaaatatttcaaattgtaaaggaagtagagagtacaatgataaaaatgtaaaagctattatttagacttgccttctttctctctgctacattaggatatggaattttctcatgttaggtttgtccttttctgcagctaaatcttaatttctttttggttttccatctcagatagttttcctttctttctctactcttttctgtatgaatgttgagttttttaccttgtcttttttttcctctctcttgtctctgatctcaactttgccagagctattttagcagactaacttgctattcttatcttgcactactcttttactacctaatcagcagaagtgacatttaaaagaagcgaaaaggattgaaattcttttggaagttgtttatggcaggtgcagtgggttaagtagatgagggaggggtgctatagtccttgaatacagaggcagcaggaagaatcccatcctatatgctcagctttcttggggcttgttgtctgttttttcaagcagtatgtggcaagatttttaattttgattgaatcatagtctttttaaaaatatgtttcgattactgatacatttggattcattttaacgttttggctctgctcagcatgctcttgatttgttctttcgtgttttagtctgtcttctgttgcagtgatagttttcttttttctttctattgttttagaaagtgtaaattgtattttttgttcctaaaagtatccttatattatatatgtatacatatatataatttttaaatacccaaagttgttattattttttcctgaagttattccgtaacattttttccttgtatgtccccctctttctccttgggtatatttttttctccttttgacttactgtctttagaattacttctgtagctaattggaagaaactatacacatactatatatatgaagacagtaattttagagtttatcaaattagccaataaactagagctccaatgcacactaacaaaagtaataaaaaagaaaaccattcaacacaataatgggaacatgaattcattcccttcttcctcagagcctttgcccgatcttccctctgcccggagtgcttttcactactagccacactgatggttctttcactagttcctagtctctgctcctgaagaaacatgagcacatgtgaataaaaagaggaattctttaaaagctttattgccattttacattttatggttaaaaaacaacattttaagtgttgatcaataggagaaaggctgtataaactgaagtatatccctaatatgatgcagtatagcagaaggccccatatgaattaatacaataagacctaaagatttattattgagtttataaagtgagttacaaaaaggtatgcacaagatgtatcatttttattacgttttaaacctataaatgaaatgccgtatatttcagctgtttcatatattttgtatatggatgtagatagagcatcaactccaaattgattagatgaaacaataaaggtaataagggatgaacggactagaactgggagtagtggtcgaaggagattttagtctatctggaatgctgtattactttaaattatttcatatatttgtgaattctttctagtattaaaccaaaaaaagtcataaaagccatcacaaaggtttatctacattttttccttgtctactcatagaaaaagggagagaggagaaaacgatcaccttcttcattagcttttgttcagccttcctacgtattttttttctgcctctgggatcatacagcttctagtttacactcctcttaggttcctactatgtgatttatattatagatatgtatttttgtccactccagtagaccataaaactaatattacatctgcttttaagtattcttaaaacctaataaattattcacttagagtaaaactttaatacatgtttttggacttactttgaactaaattaaaggaattaagtgaagagtacaaaaagagaattgccaaattaagatactgatttccacgaaatgacattttaaagtggtaattggttcattcttaatccccatccaatctaggcagttgtattgttttctgaccacctccatttccttcataggaaacagtaaatggggctgtgtgtgtgactactgaggaattagttggtccgtagtggtttttgttgatgggttcagtccactagggggcactctaggatttccagaaatgaagactttttctgatggtcccaaagggtggaacaattaaaagagaagacaagggggcatgtgagtcagtcaagtcacagataacaaggaattgcagtggaatggggggcagtgtgtgtgtaaagttcatcttcggttttcagctctgacattctatatagaacctcagaaagctggagttcataggtctacgaatccattgtgaggatgattctataagcagaggtaagggaattggagttttactgggaattgggaggatggacactcaatagaaaacatctctattacatattttcagtttttaaatttttatgactaaaattcctgaaattcactggcatggaaattattccaaaatacccctgatatctgatttcttcatatatcttctctgagaccaaaaggaacaagaataagcagaaaagaagaaaataggaaggaaataaggaccaaaaccagaaagagaatagagaggagaatatttaatttggccagcagtatgtggtctgatcgtaacagctgtgtgggcctgcagggtgtgtagggaaagggttggacagagtgggagaggtagaaattaaatcagggtggatatcatacacacatcctatttttcttttaaccaaacaaactctagttggaaacattttctatgcagacaatctcctgatttcaagaaattgtatttatttctaaatccaccatacatgctaccagaaagttttccttattaaaattttcatataattgaattttgcaattttctgtccagctatgtaatttgggcttcccatgattctttaaggctctactttccccagctgagacacggattcttctcagacgtatcatcctctttcttcacatactattctacaatttctcttatataaagtactttaaggaaaaaaaaaccctgtaacttcatacactggaaatattgactcttccccccttgcactattcacacccagagttttggagagattactgtgcggtctcaaaggccactgctggtggagtttcctattcagatgaatgacagagctcaggtgtgattggtgctcagggagtctggtgcaaactattgactgtaagaacaagtttgtctggacccaagacttgaccccttccagagcagcggcaaaggcaccccagcaaccaggcaaggagccatggagaggagactgggagctctcttggggcttttgtgggtccaggtttgctatgagttgggccgtcctagatgggggctgacaggggaagggagggaagggagagctgacacaaatctcctggactgtcctacagcctcataagtgtttctagggatattttacaggcttggaaactgcatcagtgattccttagtgacataatacatatttgcttttctctttccaagcaggggtgagacgagtgaaggtggagcagagtccttcagttccgagtctccaggagagaaccagctctactctgagatgcagtttttctacctctgtgaacaacgtgcagtggttccaacagaatcctgggttggcctcatcaatctgtttttcatggcttcatggatgaagcacagtggaaagttatggtcaaaaagaaactctgaggagctctgtggtaccctacacatcacagccgcccaactgaaagactcaggcacgtacttctgtgcagttgaggcacagttctcccaggaaatctgcagcctggatccgaactgcagctgggcctgcagccccaaccccttccgtgagagaggcatgttgcccccacagtatcacttgcacagcttcgggttttctgattgacgttgcgcttttatctctgctaaaattagacacttcaggattgccatttaacttttttatcctacccttttgctctcagaaatctctttgcaggaaaaagctttgatatggaaccactggagcaacttttaaagatatcaggacccaatgtactgttaaaacagatcctctagcaaagagcatataaattacatataaattactgtgataaaaaagatttgaaaaaatatatcctggtcaagaaatagcaaagagcatataaattacatataaattactgtgataaaaaagatttgaaaaaatatatcctggtcaagaaatagcaaagagatgactcaatgtttcatccaaatgcatgttgttcacttttctagtaaaagggaagagagcatgtgtgatgtatattatatataattttttactcctggaacccataaaagataaaattttaaagcacgtaacgtcattggatgtcagacattctctgaatttacatatattatctgggtgctgacaatacctctttactctacacatgaataaactgaggattatagggcacacatgtcttgcctgagctcagatggttatgaaactagcaatgaagctgggctgggattctccttctcgatgtttgaaagcagagtgtgtactctaagctacacacaatagaagacccttgagaatcacaaaataccaattatttcaattgataaatttgtgcaatgtgctcacatacatcactggcaaatatatccgttgggataatttctaaattgcatctagtaagaaagagttcattaaacttttcattttgttacattaaaatccatttgtcttccttgcattactcatgattttgtaacatcattcaaggtctcgaaaagagaacagaaacttctagggttgccccccaaaacttacctgctgtagccgcagtccaagacttctgagaagcaaagccaaagtttaaacctaaatgtggatcagttacaacacatgtagaatttcagccttacaaggtctgttatatgaatgtaagagaatggactaggaaggactggggccctgagaaccaagatgaagacaagctggcagtctccggtgaagctgggagcagggccagcttcctgggtatgtgatctgttgcagcccacaggaccctagttaatgctctgctatcactgccttgacatttttaatagttttgtttttaaacttgtgtgagtaaatgaagttcaatgagaggacagagcatgtaggtgagcagaggagatacacaggacagcaggacacaggacagaatcatatgcaggctcaggttcatgggcacagtgggcagcatgtgagccgagcagttggatgggctattttgagtgcatgagcacacagggctctctggtgttttgcggctctccaaagtgagtggcagtaaacttttcagtaaattattacacaataaaagcatatacatggacaaggcaataaggtatattggagagttattagaatccttcaaaaagtttagagactgtggttttgaaagttgatataacattacaatttggatatctgctggtttagaaatagaaattacatgtaaggatagcagcttaatggaaaagagcatcattttctcaccttttaatgctatcttcttttgtttttttccttaacatcttttttttcaacttttattttagaattgggggttcatttgcaggtttgttacaatagtatattatgtgatgctagagtttggagttataatgaatccattacccaggtagggagcatagtactgaaaaggtgatttttttcaatctttaaccccctccctctgtcccctctcttgtattctccagggtctactgttctcatttctatgaccttgtgtgcctaatgtttagcccctacttataagtgagggcatgtcatatttggctttatgtttcagtgctagttcacttagttatcctaagttatcctaatggtttccagccacatccatggctgcatagtagtccatgttgtatatgtaccgtgttttccttatcaaatccactgctgatgggcacctgggttgattccatgtctttgctattgtgaatagtgctgtgatgaacatatgggcacacatgtcttttggtaggatggttcattatcctttgggtatgtagccagtagtgggattgctgggtggaatggtagttgaactctcagttctttgagaaatctccaaactgctctctatagttgctgaactgatttacattcccagcaacagtgtataagtgttgccttttctccacagcttcatcaacatctgctattttttttggctttttaacaaaagccaaacattgtggttttggtttgcatttctatgatgattagtgatgagcattttttttcatgtttccacttgtatgctttttttttttttttgagaagtatctgaagagcattattttcatgtgaagttttgaacagccacgttttaacatagaggataatattgaaattaattaactttttttttttttttgagacggagtctcactctgtcgcccaggctggagtgcagtggtgcgatctcagctgactgcaacctccgcctcctgggttcaagtgattctcctgcctcagcctcctgagtagctgggattacaggcccctgccaccatgcctggctaattttagtagagatggggtttcaccaagttggccaggctggtctcgaactcctgacccgtgatccgcctgcttcagcctcccaaagtgctgggattacaggcgtgacccaccgtgcctggcctgaaattaattttttaataattgaagatacagtgataaaattaataaacaaggattttgaattatatctatatcattaagccatttctagtttcttatacagcttccacaagttactaaaaatttcagaggaaacattaaaacagcactgtgtaaatttacattgaaaactgagttcagacgtacataaaactgatttgtggtaagaaataaattgttttagaaaaattgtttcacagggaccatcaaccactgatttactaaaatttatatttcagttaatccatcagataagtatgctaatgttgtcacagtatataaaatacttttaagagctccagtatcagttgcatcagcagaaatatccttctcgcagttagaaatgaaaaattctagttaagattttgcatttaataagagcacttgatattgctttcatttatatgcttgaaaatgaagttgctccaggcatgaattttgctaacctcataaattaatttgcagcaaagtgatccataaaattttattaatcaagatatcatattaaagtattattatattaatttatgacaccaaatttttaaaccaattttatgttttttcttatgtatcattataaaccctattgcattttataagtaataaaatattttaagaaaaaaactttacagtttattacctaatggctatttttcctgccttttgaataagaaatcctaaattttcgttttgcactgagtcccacaaattgtacagccagcccagctgggaatcttgaatccccaaactaaattttgaaggagagattttgaagtctgaaagcaatcaggatgtttgagaaagtgccttttgctttacatattagtaaactcctatacttcttccatgttctccaagttgctgaggtgtgtgtgtgtgtgtgtgtgtttcctttaagacagacatgatacgctataaagataagaaatcgatatccagaagggagaatcctgcctccctatagcccagccatggtgtccaccctcatatcactgcttgtgatggcctttatacttagcgagtaaagtctcatttgatttcattttactatggatttaggcttccgttgatctaccatctatcactaatgttgtaggaggaatgaaaactcacataggaactcatctggaggaccttgtcttttcttctgaaggggcccaaggattggttagggtaacctcagacccactagattgcatattgatgtgaaaatggttttggggttccatgatgcaagacaatttctccttgcattcccatactttacactgtacacaactagtccttaataaatatttgctctgttaaatagaataaaataattttacagctagaaaagcacttagaaatcttttagtccaatttcactttacaaagagagaaaccatatccaagatgccagtatggaaccattagatgagccgggagtagaaagaaactggatttcctcccttcctccttcgtattgtttcctctgcctcattcctgcaggaccacattgctgagcaaagagaaactgaggaaaatccagccactttgacctctgcagtttgggtctgggaaagacttggtccaatcagtttgaccatgagaatggagagttccaacttgtgtaagtaaacatttgccactttgggccacagagatactcatgaggctgagccattgttattctaccagcaaatcagtccatgactcactggcttctgtaggagtgagccaaaagtgatggtgccatcctcaacccctggatgtatttctgagaattttcctaaaaatagcaagatgtgtaccttatggtgggtggatattccttgaaagaaggatgtgaacataaggagcatcactctacattgtttaaaaatgatcactgaaattgggaagctaaggggaacattgcccctgtgtagctggcagttcatgaaagtgctggaaaagcttttccgggccaaccctttgataatgagtctggcaaaaaacgaaataatcaccaggctgggaattttgtccagggcacggctatattcaaggtacagttaatatacggaacgctgtgctccatgtgagtggtcatattcagaccattacattcagttctggatgtcgtaactcaaaaggacaaatattaacctatgtatctgtctccaagaagaaagtaatttgctcaatgaaggatttgataattgtatgaggaatgggtgagataactgaagatccttagaatggagaaatttcatatatgtaaaagcacacattatatatatacatatatttatgtattgagttgagattcttaatcatagctgtctgtaaatatttaagggtgtgagatgtgaataaataattagatttagtctctataactccagcagactagtgagtacaaatcacaggaaaggggctttcctcctggaaatgagaaagtcttggtttcccaggtaccatttctcatgatcagtattttactgtcagttttctatttgtactattctgctaacaggcacaggaaatatttagccttccattaatttattcttacagaagtaattttaaaatttcaaaagttaaagtagattagaaagttttttttttttttggcagaaacagataaacctggaaacatacaggactgaaggactttctcaatatcttggagaaaaacattatggtggagtttgggagaaaaatgatagatatggaatctgtgccagcaatggctgagacaacagcagttcatgacagaagagttgactcatactttagaggaaattccactaaagatatgagtcagtcactgtgtttaagcacatatcatattgatatcatccactttgatatcaaaaaataaaattatctcaataataaagttacatatgcttacattttttgaatctgcagcctgatgttttctgagaatttcttcttgttttttcaacactttgcagaaagcaagccacatagccataggaaaagacttcttaaaacatgccagatttctccttgcaaaccagcccagtctatgggtcaaactattcctattgttggagtattaataactcatggaacttgtccccctcctcctttatcattgtactttaattctttaccttttattaaagccatctttactgaagaaatattcaacattttgattgtcggtaccgtcaattctctgggaatagcaaggtcatggcccaggcttgagaagcagaacctgagataatacgcactcgaaatattgagtggtcctctctctcttgctctgatctttggcttacatattgcctaaagaaagagttttcttcataacaaacgagtcatgatagtagacttaacctaaaaggaaggcattattttttcttgtttatgagagcgaattatggtattttcttaatttcaaacataaactcagcccatcattgaataaatatcaacagcatctacttctttataatttatgaataatgactcagtagtgtgcataattatagagttagatctctacattcttactgtgcatttaatctctgattgaacacccagtctgtttgactcattgctgcttttgtgcacctgagtgcctcatagggttagagaaaaacattcaaccagcaagttcagtagttagggatgtggccacaagatggcagtgctcctctgctgaggcagaatacagggttcactttagtgtgtcctgaatgaataggtttatggtagcagcagagcctttttcttattggttggctacacagtgtgagaaacccctatggctgccagaggagagaagagacaacctgatgatagaagtaactcttataactggaggttgcaggtcaatgactgatcttaattgggaagaacaaggatgacatccattcgagctgtatttatattcctgtggctgcagctggactgtgagttgagggtatttgggtaacagagtatattagtgaatattcttcagcagttcaaagaggagacttgctttattcaggtttcctctcgttactatgaaaaataattctagagagtaatgacctaacaatccctcttctttctctgattttttctttctgcatagtggtgaatggagagaatgtggagcagcatccttcaaccctgagtgtccaggagggagacagcgctgttatcaagtgtacttattcagacagtgcctcaaactacttcccttggtataagcaagaacttggaaaaggacctcagcttattatagacattcgttcaaatgtgggcgaaaagaaagaccaacgaattgctgttacattgaacaagacagccaaacatttctccctgcacatcacagagacccaacctgaagactcggctgtctacttctgtgcagcaagtacacattgcttcccaggcacctgctacccgtacacaaacctgagactggagctgaagctgcaccccctttcctttgtcatagatcgtcaattatagcatttgtcatattgtttgtttgcaagttgaaactaacatattgacatttaaagcatataataaaaaggttaggttcaatgtttttgtatttttagtagagactgggtttcacatgctcagctaattttttctatttttagtagagatggggtttcaccatgttggctaggatggtcttgatctcctgacctcgtgatcctcccgcctcggcccccgaaagtgctgggattacaggcctaagccactgcgcccagcctaatttttgtatttttagtagagacgggatttcactatgttagccaggctggtctcaaactcctgacctcaagtgatccacccgcctcggcctcccaaaatgctgggattacaggcgcgagccaccgcaaccggccctatcttacacattctattagtagattacaacaggactttggaccaatggttaatttacagacagcttgctaaaaatctccctgcctcattttcatgttttgactgaattaaacattactaccacaatttcttttaaaagagttatatcttttagtgttgtagataaatcagtggaaataaagaaggtgcataaataattaattccctatttctcccacctgtggtcaagagtaggctaatttcaagatctcttgtattcttcctaaggatggatctaatcagcagttggaatgggagaacaattcctcctggctgagttttggctgttatggcttgttcttatagggaaagtagttagattaaattagggttaaaacagctggacaagaaaggtcagctgttccttgtctcttccggctctgagggctgcctgcatttcttggcttgtggctccatcactctgatctctgcctctatggttgcactgcttctcttcttctgtcatctccctctgcctccctattataagcacacacgtgattatatttaaggcccatataacataggataacttctcatcccaagatccttaacttaatcatatctgcagtgtcttttttcccttggctatataagataactttcatggattccagggactggggcctaacttttttggagcccttattttgcctaccacagttggcatgcctggtgctatctttttcagaagttgagaaagaaaatcagagttccagatagaaaaatagaaaccacatcaattgctttattttattttctcagtttttacaattttcagtttttaaattatcacttaaaaaggaacacattttgatatgcagttcaatgtgtgaaatttgaattttgatatattgcatagtttgatgtaaccattacataactatgatacgaaacagattgctcatcccaaaaactcccttgtgtgatctgtgtgaaatcacacctccatctcaaactccttgcaaaccttggtctgttcttttatatttttatttttttctggaggtcacatgggtggaattatacaatatataatcttttgaaaagtctgaatcttggttacagaaagcacacaccattgggcacatacatgatcatcatctctgctaccactcttttttttctatacctgaatgttttaaacttttgtcattttacaggaataactcaacatttcaaatgtttgaatttctttggaggtttgatttacagtttaaagaaacactatggcaagtatagtgtttaaggaaacggtatggcaattgataatggagaggttcagttgaggattgaaccaactcctagaatcagagttaaacacatcaagtttagttgtaccaacactaccctaaatttttatcaatagatatttctctaacattttaaggctaagtgtattgaccgaaatgtattttagtcatattaattgggtatggttaatacttggattttcccaggagttagcatagaatgacatatctcacaattatttaaattttttgcactagctgtggctttgtagaggtgaaaagtgttaggatggttattacctcaagtaaagcctgtacctaagcaaattgttttattaacaaaataacaaagtggaaaaaaattacaaatatatgcaacgttgtaccattagagttgaaaaataccaccaaatggatgaaaaagaaaagaatgcaaagatagtataacaaccactggttccagtcatctagataatactgttcgattatacttgcatggagctgtctactttatccacttatacatgtgtttcaaggacctcgagtctgcactcattttctgaaaagcccctaaatagtctctgaagaaattcagtttaatatctgtaatatgaataacttctcaattcttgccatttaaggatggataatgtcaaactaattggtacaaagtaaccacagatcaattcctcgtactttaactgttgaactggtaataaacagtacctaataaggtcattttcacaaggttgaaaggcagtctttctctggaatttttttccaaataccaactcatccaggcttaggtcatgtaaaggctgattaaatgaaaggccaggaaagaaaactgtacctgttggtataaggactgagtataatgggtttatttatctagataagtttgtgaaagaatgaactatataggattccagatactaggagtaatatggacctacaagtcaccagttgatagtaagacaacctatgatggcagagtgaacaactcagggccatgaaagtgaagggtaataatatattagatcatggaaattcaaggatgtctgataccgtaattaattttagttttaatatttctcatgtgttgtgtcttcatttatagaggataaggaggtgataagaaaagagaagttctgagtgagggcaaagcattatataacttcccggaaaattgtgttcccctatatatagataatttgaagtgtcacatattcaactgtttccttaggacagtattccagttcatattccatttttacacttttcatggaatcttataggtttcaaaaaaggcatgaacttgccactttctgtgttctcctagaaaagttttccccaactatttgtataatattgcagccagtacatccctactgtgatgggctgtctctggaaggttgctaaaacaagtattcactggagatcatttggtcccaccaggcagcctttctggccttgatatatcttatcctcactgatcaaacaaatcaataattgatccaagatgtagttactaaaattttccatagatttttctgcatgttctgtaagaggtacttgcatgaggacgttagtcagaaaggcatgtttagcatgattctctgctcatgtatttcttcctggcttctatagtgtctttcctactttggaactttgtctttctttgagtagtatcaataattcaaataattttcgtatttggtgtctattttatagcgatacatgagatgtatgaaaaggttaagaaggttaagaaatctcatcatctccatagtatttgagagttgtgaactatgttaaaacatataggctatcactgtatatatttttcataattggacatagcaaagagagagccacaaattcagttactttaatttgttttgcttcttctaaggaattagattttataatggagtctggagcagtaaatgcattataaaccttgtgttatttcttttcagttttgaagataagacattaaaaacaaaattaattcagaattaggtatgagactgtccaaaatatctgttctgggatggacacttcttgagttacagaaatgcaatcataagattcattgattgagaagtgtaatggagttagacgctatgaggagaaattaataatattgtatagttagtccaccaactggtaaaaaaatggttgtttttacagagtagatcatttgtgctgtatgtggcatcataagatttaatggtgatttcagtgaaagatctggagatgcttcaacaaatttagacatagctgaaatcattttaagacaaggaggataggttgtaatcattatattaagaaataggctataataggcaatgggtctttgttgtttttaatgtaattgagtaatatccctaggacatggccttactgctaatattcacaaaacgaaagccttatcacaatcaattttcctataatagtttttccttgggagacgtatggagacacctaggattcatacctttcagcagtggatgtacagaatgtaatggcttgttatggctcatttggggtcccagatgacataataaaaatgcataaattcaaaggtttgataacttaatgatcagagtctggtgtctaatatggcctgtataaacagagctgggctgtctaaactaacttgaaaaaagaagaaaacttttaagataggactcaatgtctgagggcttcattctaaactctcagaaaaaagagattagtttttttctgcgtagaaaagagaaagagagattagtttttttctaccgtttgttccccagataagcaactggacagactttgggaataggacaaatattgctatattaacatgtaggtccgatgatctgcagtgattagtgcaaacagcttttccttcttagcataatgtgattaatttctaccttaggagaaacaacaacatacatagatgtgaggatacataattgttacatcttccgttgccttcattattcattacatgtagtattttaaagtaagtgccaacctctcaacctcattgctcagttccatcacagatgcaatgactgaacatagcaattggccgaattatcaatttcccttctaacctgaccatgtttattttcatatttaagttatttattatcaaattaagggtgggtaagtgcaaaggaagtttgcattgggtgaggttcttagccagtacatagagaagtgttagataacacaaactagcttgctacaccggaaaacctccgtttcctattccagggcagcagcagcagcagcagcacatagtccagtaattcttctcttacttcatcagactcacctcacaatgcagagccctgaattttaagaagaacaaaatatattctctctagagaaagaaccaaacatgttgctctccagctgcctgagggtggtcacagcttcaatgtggctaggtagggatgcccctggtgggaatggtcttcctctaagacccaaggactgggaaatgtctcatcaaaactttgggacagaagaagtaacagggtgtaaaaatagaatttctttgttccacatcactcatccctaaaccttttggttctttgttttctccttcagaatctggttttgctgagaagtaactcaaattaaaccatcagtattggtgcatgagaaggaggctgtgactctggactgcaattatgacaccagtgctggaagttatagtcctttctggcacaagtagcccaggagtggggagatgattttccttattcatcaggactcacgatcagcaataagcaataggtcactactcattgcatttgcagaaggcaagcaaatccatcaacttgtcatctccacttcacaactggagaactcagtgatgtgtttctgtgcactgaaagaggctacagtgagagaactgttggagtgaggtacacaaaatccccaagggtctgcttgagacatccacttgctggagagaccaaagaaaggattcaccatcacagacaggaagtggctatggttgtgacagcacaggtgtagcatcgggggaaaacactgtaagaaaatacctctctaggcttatagaccatttccagaattatcattcatcaaaaacatcctaatccctgagtctttggtttgaagttagacacaccaaaattttgaccaatgattgagagaaagaactgccacaataagcaatttgccatctggccactagattgagctggaagaattggctaaggtaattcagaaacatatgactgaaagatgaataaaaacaaattcaacactctttgtgaattgttggattttcagatcagtttattcaataaatgctaggtgtcttcaaaaagtttatggaaaaaagaaattgcgtattatgaaaaacggtgcatggatttcaaattttctggcaccaaaataaacttatactaagttgttataacatatctgaacaggatttagtttgaggcactaagaaggataagacatcagtttgaaaggagcccctatcagagcaacatgaattctgttaaacttgaggcaagaacaaacatcaaatttatggtgaaacttgggtggaagaatggtgaaatcactgatgctttatgaaaaatttataggctcaacactccaataaaatcagccatcctcttgtctgtctgttcttaaacaaaatggataatttgtttaagaatagacaagaggatgccgatgaagcccacagtggcagacattccataacaatttgtgaagaaaaaattaaccataagtgccctaatcaaaaaggacggatgattaacagtggaaacaatagccaacactataaatgtctcaactggtttagctcacacaattctgactgaaaagttcaagttgagcaaactttgtacttgatgggtgccaaaaccactatgctcagatcagctccagaaaagagcagagctttcaatgaaattttgaataagtgggataatgatcttgaaccatttcttcaaataattggaacaggagatgaaacatggctttatccttttgattctgaagataaagcacaatcaaagcaatgattagcaagaggtggaggtccagtcaaagcaaaagtggcccagtcaagagcaaaagtcatggcaacagttttttgcgatgctcaaggcattttgtttattgagtttctggagggccaaagaatgacagcatctgcttattataagaatgtttagagaaagttagccagagctttagcagaaaaatgcctgggaaatcttcaccagagaatccctttccaccacgacaatgctccaacttattcctctcatcaagcgaggagaatttaggtttctgtgggaaatcattaggcatccccctcacagtgctgatttggctccttctgacttctttttgtttcttaatcttaagaacgtctttaaagggcaccacttttcttcagttaataatgtaaaaaagactgcattgacttggttaaattggtggctaatcatccagtaagtaagcaagaagaatacatattcaccgagaataaatatgtatcccctatgtgtacaacgtactgtattaggacctttgactataccgacagtagtataaaatgttactcttaagcagaatgaacttaccagaaaaatcttgcaaatcaattgaggaataagatgaaatgcatgaaaacttaaccaatagataaaattccaagtatgtgggcaattaagttttaggggtatttttaggagaatagtgtggcaccgaaaagacacaagtaagcatcatggagagatagaaaacttaggcattaaacgacagacacacattgaattcattcattatacacttacttatgaaacacacaataagcaacaattgtttttgtaggtatgaagagtagaataatgaataaaacagacacatgcagacaacaaagaccttccctcatgaggtttagatctacaattgtctatagtgttcccttcttttacaggaatatccaatataggtatttccaatatatctgtttcactataggcatttgtcttgcctattctagtgattggcaggttccatgtgaccattacaaggcatagtcactgaagtactattaatatacctgtcatttactaaattatttgaccattgacaaaattacttaaactcaggccacctagacatcatcaattgtaataacaataacaatcacctctccacatagttgtaaggattgaattaaatttcatgaatttaattaaatgattgaattgtagtggtagggaacaatttctcaccaatggtagctatacttggatataaatgagatattgcaacaaagacaatttgaaataaaataacaagaaaatttaaggatagataaggcttaaccctctactctcctgctattggttatattattatattttactatatttaggactgagagtcactatttcacactggcctgattccatccaattatttgaactatttctttatctcataggccttacgggtagagaatgaagctttcttgcttcaggtataacttagtgtaaattctatgatggattcacatgagcgttatggagcaggagtcagatatacaccattttatactgagctacagtgccaataactagatccataactgggagcttatttaacagagctctgctctgggagaaaataacttttctaggtcatccttgggggaggaatcctttttagttattcaatttacaacttgtacatacatggtagatgcccaggaagtattacagaagaaaaaaggaaagagaaaaatctaagggacaaatgctagatgcagctgactgagaatcagcacctggttctgccagggtcctttcccatgctacctcttcagagatcagagacagctgtgcgatctgtgcatgggggagtaaatcttgtttctggctggatggggagactctcagcttcctgcaacaaaactatgaatattcactcagagaaacaagagatttggcttggtagtgtttgagggctcccaggccccagccagagtcctccgtgagtctgagggataaaaatgaagaaggctttgggagtttcattcttgattttctcttgggagctgtgctgtgagttgctgggctctggaaatatgaaaaagagcgagtgtagtatcttatttaaaagtctggaagttatagaagggtggttaaggcctcagtgctcacctgtgggggctgtgaaaagagagcatatcttctaaaagctgtcagccatgaatgaatgtcatctgtctgtgcttctctgtttaaacaggggtgaacagactacatacgccggagcagagtccttcattcctgagtatccaggagggaatgcatgccattcttaactgtttatgtgtagggggaactttctttataacctctgtctccaaacagaagtgaagaataatgcaccatctctcatatgtgaagaagctgaatttatatggaattatgtttccttttgtcattattgaaatttcattcctcaatgtagaccatacagatcctgggcctgcttgcccagagtccttccactcctttactgtttgctctgagaggtcacagtctctgagtccatggagcaaagtttcccctggttgtacacttagcagcatttaacttatattttcataatctttaaatgatgtttgctgtatctgtgtatcatctactccataatttacttaatttaacattaaattgatttctctattaaatagatgccaaaaatatgtaaaatattgtccttactttaatagatactatcagtgggaccacatatatgttataaaatgtgcatttgatgtgcaagatattttttcctaatacaaattaaaataatgttacatatataacagtcagaaagaccatctgtgttctgcctaatatgacctcctgtatcaatcgcactttagaaaatacatttccagctcatgcccctcatttgatagatgaaaaaaagcaggctccacaggcatggcttcactttactcaaagcatgtgttgcagtgaaatggaagcctggagtagaagccaggcattctggccccttgtcagttgctttttccatgaaagatgaaaagcgggattcggtgtttgagaaaaggagttgtgtgttgtaattttgaactaaattacatttttattacttatatgtatatataaagatataaaatgatatataaagacataaaacacccagaaaaatagaacacacctataatttcataatcaagaaattataactattatcctgtaaaaaattttggtatacatatgtagctattttttctataaaagtggtttgcaatatatccagtatttattaccatgcttgtttttctcaacattatgtttaggtgttttcatcccaggaagcttatattgaaggcacagttttattttattttcttttattttcaacctttattttagattcagggggtagtacatgtgcagatttgttacctgagcatattgcatgatgctgaggtttggtgtataaatgatcccatcacccaggtactgagcataataccaacagttattttctcagtccttgccccttttctccttccccctctagtaatgctcagtatctacatgtagtctttatgtccatgtgcactcaatgtttagctcccacgtatcaatgagaatatatggtatttggctttctgtttctgcattgatttgcttaggaaaatgatctctagctgcatccatgctgttgcaaaggatatgatttcattcctttttatggctgcatagtattccacggtatttatgtgtcacattttctttatccaatccacttttgatgtgcacccagagggcataattttaagtgattgcctagtttccattatatagatatattttaaaaaatttatcacttttggtattatttcctcttatacagtgttatagataatgcttcttaaaaacataattaaatttgtaattttaatggaaatagagttgcttgaataagggagaacatataacactaaatgcctaatgttcctgaagatatatttcaccaaagtgtaatttcaacagcagcacatggtgatgctgatttttcaatactttatcaattatgaccattattatcttaaagtagcttccattttattaataaacactttagcaatgttttagttttcttttaaagtgtgagtttatatattttattattaaaaatgtgatttaaaaacagagtccatcacatagaatattctttcatacaataagattttttaaaaggtttgaagaatactgttctggcccacattaccttctattaggctggtgcaaatgtaattgtggctttgccattactttcaatggcaaaaaccgcgattatttttgcaccaacctactaactggtctctttttcctcaaggcaatctattctccatgcttttgctactcagagtcggggccagcactgtctggacttgtgcagatgctcagcctccacccaaggctgactgaatttgaatctgcatttcgttaacattcccaggtgattctatcacttcaaagtttgagaagcacccatctgatgggttcccagaacgattttttaaagtataaataaagagatgtctctaattggcaaacatgcttcaatggctttctattgctcctggaataaaatgcaaatttaggctgtggcatacaaagatctgtatcattcaaacctcccctgtcccttcagctttaaactcttttttcctggctttctatgcagcaaaaacactgacctcctttcagatttctgaacttgccatgtcctttccacatttagtctaactctctcaatcatctgcagtgctcttaccctaaatcttggtgagcctgactcattttcattcctcaggtctcagctcaaataccactgctatagagaaaacctgctgacttctgctgatcatcctgactaatgtggccatcatggcttttcccctaactctattacaacacccttgttatatttcattacggtaataatcataatgtgcagttatattgttggtctacgtgtttattgtcaatgtgtttattgtctatatctccacctaggatacaggctttacgaggtcagaggtattgtttgtttagtggacagctttattcttagtgcttagaataatgactggcctataatagtcagtcaaaaaaatattcactaaatgataaatggatggatgttatttggccctcctctttccttttttccttcctctcagtctcaccctagcaactttgacctctttttgtgttctctctgcttcattatgtggggcagctcagttctttctcacccttgctcccagactcaaaacccagcctttctgtgctcagtgaactctggtcaaatagttagatccattcagggtctcagcctttcctcactaaagtgacctcactttatcagatgtgatctgaagcacttagtcaactctaaaggctagtaacacatgatgaaatatctaaatgaagaaaaaaacacttaaaacattttagaaagtataaaagtaacttctcaagtccaataattatgagctgaagtcaaagttataattcaaattactgtaagagtaaatgcccctcaggaaacaaattcaaataaatagccttggtagacgtgttgtagatcagatttttaaaagatctggtttaaagatatttacgttcaaaggactggttcataattaccctgcttttgaccatctgtgtagtggctattaggcttctcaaaagattaatagtcatttgagttggtaacactaatttcccagaaggagtctttatttcattaaagtatattataaaattgctcaagcattttattggaagtgatggttaattacctatggggctatatacattacatccttcaaaaaaaggtctcttccagactagtttggagaaacttatctttctcacatgtagttcaagcctttactatagtagagaagggtgttatcagttcttggttttttttccctcttcctgcaagctaataagtgtgttgtttcatccaggttttcagtaaagacatgagactccttagtcagagacaaaggattttgttacttatggcacagcaaacagcctaaacattagtaagttcacttcagttactctttccttaagtccccaaaagatgatacagtgagtgctgatgagtagtttgcatgcagtggtgctgtgtcatagatgaggaactctgagcctgggaaatttatagcaacagtaaacagtaagccagcttgctctttgtcgtacagggagtcattaactcatcccttaaggttgattgctgcaagcctaactctgaaaagtggtcctggtagggaggtcatggctttacactattggcatacccagcaggtcatgtaggggtacaagagactcatagtggactgtctttcaacactatccactccatggtcttatgtcatgttagctgctggaaatttttcttatgagtattccactccatcagtcattctgattaatttgactagagaggtagagagtaaacgcatagaatttgtcttacacaagatttaattaaggctactgtcagtagaactctaagcatgaagaggagaccaacctgcaatagcaacctcaatcatgcctcataggatcctagattctcccagctgtgaataagtcccaaagtacagacagctaggatatagtgtattatttaatatgacctacacatggaaatttagactgacatgctgatctttgttttaattgccaaaaagttaactattattcccaatatagagatctcctatggtccctattccccagacataaacataaccaaaggtgccgaaattaatccagtttgaaatttattgctacactttatttgggtcagcattagttcactttggttaggctatatgagcagggtcagtgagtatttgaaacttctgtaggcattcatggtataacccaagacagtccagacaccaggggaaaaatacacgtttgtatgaatcagattgagaaaatgttgtgctgattcctgtgttttcacacttaagaggatggggaatctgtattgggaagctgccattcatgttgtagaaatgttcaggagaggccatattcacaggagtttttctgttttcatggaatgtggaaggagatgacaaaccaacacacaaccaaactatatggttgccttgccaggctgtgtgcttcatctagcatacaaagagagcattaatcctcactcgcttcacctccagtggtccaagattttcccttcctaggtgtcagtgttgttgctctttttatccacaatcacaaaatttgttcatcccattctagtagctaaagctttgcctttattgtggtcggttcctagtcatactcaaactttttgtctagaacaataaatagaggaaaaaggtattttatgacatttatatatacccattttatttattacctgggccctcgtggaccattgtacaataattcctagagcagaacactcaaattaatgatagttaacctcataatatatgaccatgtttgtccaacaaaagaatccaggtggctgaaccagaattcagttttaataccattctgaccatgttgctaccaggacagtaaacctaccaggctgttctaaggttgctgttaggagaaaaaaagaagcatcatgccttccacttctagaaagttagagaaggtatactttttttccattcatctcgttacatacagctaatgattctggatattacagatgttccttgacttacaatgggattgcttccccctaaatgcattataagttgaaaacactgtaagtaaaaagtacatttaatacacctagtatgctgaacaacataacttagcctagcctatcttagatgtgctcagaacacttacagtagcctatggttgggcaaaatcatccctaacaaagcctattttataatgaagtgttgaatatctcatgtaatttattgaatactgtaccaaaagggaaaaacagaatagttgtatatgtacataaagttcagtttctactgattgtgtactgctttcataccactgaaaaattataattcaaaccatcataatctgtgcataagataaaaaaattaaaagattctaaaaagtggggagaaaaagcccaactggttaagaaatttcagaaacgctaaagcagtgagttccatgagtttccttttgcctcatacaatcaggagtagccactgacctggaaatgttagtgaatatgtacaaaaaagcccaaagaccaggcttttgctttctttagccaaaaaaccaggagaataacagactgtcaagacacaaaactgaaagactataaccagtttactccagccaaataccacagaaagatttacagctaccaagcacatctttagtcaataaaaaagtagttgcaacctggtaggagaatttgtgttatttttaacttacctttgctccatctcctcatcactggctttaagacagtctttaaattacatcctccattccaagtatgggttcctggtgctagaagaagcagagtggaccttgttatatcaaagtagtgcttgattactttgacctctccagtggctcattgaagggctaattcaaagggcttgcctgtgtttcacacaactcaaaatcccctcagggtggagaattggctacagagaaaagtttttttctaaaaaacaatttgctaaagggacttaacagcaggtaggagaaagaatctacaaatgtgaagataagccaaataaaattattcagtctaagaagcagaaggaaaaaagaatgaaaaaatatatacctaagagcttaaatgacctgtgggacattaacaatagcacagacataagtataacagaattcccagaatgggaggagtgacagaaagattcaggaaaaatatttgtgatatgatgaccctaaactccccaaatttgatagaagacatggatctacacatccaagaagttcaaaaaggactaagtagaatgaaggcaaaaaaattcacagtgagacatattatgatcaaattgtttaaagaaaaagacaaattgagaacttgaaagctgcaagagagaagtgagtagccacatgcaagagatccttaataagattagcagtcaattgttcatcagaaaccatggaagccagaaggcagtaggatggtataaagtgtttaaagaaaaaagttgtcaaccaccaatttatatctggtaaaactattgttctaaaacaaaggagaaattaaaacagccccagataaacaaaaactgagtgtattcatcacttgcagacctgctctatgagaaaatctaaagggaatctttcagacagaaaagaaatgacactagacacttggagccatacaaaataatgaacaatgatgaaggtaattacataaataagaataaatgccaatatttttgtagtttttgtttataactcccattttcccctaaattatttaacaaactagtggataaataataattatagatacatattaataggagcacaatgggtaaagatgcttgtgtttttgcaggtgtataaaaatctcctttgttgtttttcatagtacaacttctgtatttcaaatgaacacaaaattagtagcatttgcagtagtatcttaaaataaattgcctttgaataaaatcttgctttccaatactttgaggtccacgagacatttctagaaaattttatgccatggaaaatgaagaccacttaatccagtggagaaggggagtgtgatttctctttgattgattgccataacactgtccttaaggcatatgaaggagagttctatatgtcatctagacattattaggcacagaagctttttcagtacaactttgatgttatgtaaagtgtgtcatcttgctagcactgatatcgctcttgggtacaacattagatctattgacccatactatttttgttacaaatattcaaaaggtgatttttttctacaaggactgtgcttcaactccacattcaattttaaaagttatatatttttttaaataaattttccaagactgtggcgactgccatcttgggttgctccttctttggtttttacagttactgagaaatggcttttgtgatttctgccacttgcaacgtactcttagagaaagggatttcgatattagtatattctctttcattctatttcctatgaagttgttggtgggaatagaaaagacctgcccaagccatcattgatggatactggctacatggtccttgagtagaaaagagcctgcatccttcatggcctccagccacaagcttctgcaaggaaacaaagcatgttatgaacaagaggaggaacagtagttgtttgtgcttctttctctgtagacacaattaagtttcttgcatagataacccttcatagatctgattttctgtttaggttgagatggaaaggcagaaagagacaccaaatttataacttttggaaattaatttgaagatatgagctttttacaagaaaggcaacgagagaaactagaaaaataaacagtcacacaagatgtcattgaaagtctatgtactacttcctaaacatactttgtgtactcacttcccaagggtaagatgggtactgcacacagaggcagcccaccctaagggaaggatcatgggaaaggggaaagcctataaagctctagggtcaaggttaaacactgcgctttacctcagtgccgggcttggctctcttccaagtgtaccttcctttctttcctattctaaagccttttaaaataaatttccacccttgctctgaaaaaaaaaaaaaaagaaaggctatgtactgaaggcaggtttatctctattataccaacccatgtaagtactgttttgacatgcatgtgtcattggtgcaagatgcaatggctattcccaagcccctctattccctggtcttgttaaaaaatgttgctaaggctgtgagctagaaccatgcttgttaagctagattttaggtcattctgttttgaaagaattattttgaattacaagaaacttctttaaaaattggagataacagaatggtatagggatgtgtggcctgacatgaagagctatgcaatgtgaaatgctccttgaattgcaagaatctcacctaaatttttataatagaatacttcatgactgttatttcagtgtaggaaagtggctattagaaacaactgctcttactcatacaacaattgccatttgatatcatacacatacacacataaacatccccacagacattaacttggagcatttgcttctcaaatttttaactgatgtgtcagatttttaaagtgacttgtttacataataaggctctacattttgagtatatgtttgatcactatcatgattccacaagatggcagtgtgttcttagggaccttgaggacagctctcaagtgctcgtgtgtgtgtgtgtgtgtgtgtgtgtgtgtgtgtgtgtgtgagagagagagagagaggaggaggaggaggaggaggaaggatgaggggaggggcttagtggtgaattaggggtgttaaaaagagcatcatttttttgaactggtaaagcagattctttttatgatttttaaagtagaaatatccattctaggtgcattttttaagggtttaaaatttgaatcctcagtgaaccagggcagagaagaatgatgaaatccttgagagttttactagtgatcctgtggcttcagttgagctgtgagtttggggcatctttatataggaaaataatgtacagtatctggagttactgtctattctagatctataggtagaagcatgattttttttctaactaagggaaagtaggggcaccagtgaaaagaggatttaaattctggggagtaagcatctattacccagccagtcttctctgtctgaccactgtctttttcacaggggtttggagccaacagaaggaggtggagcagaattctggacccctcagtgttccagagggagccattgcctctctcaactgcacttacagtgaccgaggttcccagtccttcttctggtacagacaatattctgggaaaagccctgagttgataatgttcatatactccaatggtgacaaagaagatggaaggtttacagcacagctcaataaagccagccagtatgtttctctgctcatcagagactcccagcccagtgattcagccacctacctctgtgccgtgaacacacagtgctccccagacacctgcagtctgtacccaaacctgccatgccccaggaatgcctgatgtagagcttagactgcagggtagtgaaactccccttgctctctagtttcaagtggaaattataagaaccagtatggaggattaattaattagggaagtattttcataattctgaaaataattgaaaccctgaaaaaaataaaaacaaaaatcttggtctggttgacatattttttagtcctgtttttccactatagttttaaatatttttttaattgaggtctgactgataaacaaaaaagtatgtgtatttactttatacatacagcacaaactatgccataacatatccataatttctaaaagtttacttcctccctccttttttaaaaattgaggtatgattgctatataaaaaggcacacatatttaatgtatacatcccgatgctcagtctagttttatgccacctctttatgagattggttttatggtttttaaattacataacaagaaaatattttcacacaatgacagatattctctcatagttcccaggacaccttcgtctttccttctttagttactcaaagtgtttgaaagtcattaatttgggaatgcaacagcaaaacaggaatgcaaagcagagaaaaactcacaaacaaatgacttcaaaaattctacaagtcaaaaattctttttttttttttttttgagatggagtctggctctgtcgcccaggctggagtgcagtggcgcgatctgggctcactgtaagctccgccttccaggttcacgccattctcctgtcccagcctcccgagtagctgggaatacaggcgcctgccaccacaccggccaccatgcccggctaatgttttgtatttttttttttagtagaaacgtggtttcaccgtgttagccaggatggtctcgatctcttgacctcgtgatctgcccgcctcagcctcccaaagtgctgggattacaggtgtgagccaccacccccagccaaaaattcttttaattatagaaacctcacctcatctccagcctcagccacagcactactcctgatttatgtaagggtatatttcatggatagatggaagaactacagtcagagggtaagacctggttaaaactagaagtctagatagttgcagtgactaaatattagaaaaggtctatgttgccattttggggtaaagtctgaactgaactcaaaactcctggcttgagccttgtaaaagaatatattaatacctttgtacttaagtgtggcttggagatgatagggagcattagccctagccacagcatgccatatctccagtcagggcatgggagcatggaacaatctaaaattcattgagaaggatctctgagtaagtatcttaaagaggtccagacactaaggggttttagtataatgagcaaagacctgtgtgaatcaattcccaaagactatatggtattgagaatgtttcagcaaattttcgtcaggagagttggaaatgctgaacagcatataaatgcctccctccgctgactacctggcattatagatttgtcctgcaatgtatgccaagtccacgaaaaatatttacttcctaatgaaaataatgccatttaatatttagtacattgagttataggaaaaagcttgaaaagtgacatttattgtaaaaccgaatttgtggactgttagtcatgacattgtttaggtagtacaggaggtggaaaaattttggaaatgaagaatcaagatttctattcagttagttcacgtagttactgatgaaagatgcaagccaatcaacagttgcttcaaactgttaatttacagaactgaagatttaagaaatttttccaagtcatgtaagatttgtaaggcagtgaggatgatcagaaagttgtactgaaataaaaatacttaaattttagtgccacttttatcatatgccttcaggcaccctggcactctggaaagaccctgggctgccatgctcgtttgaatatcaattatgttgctaacaggccgtttatattaagctgtactattatatatatttcaggtttggatttaggattaaatgagatgaaatattgtcttgggataagttcattagaagcagagcctgaattggaaattctttatccataattgattgagaaaaccgggtcgagatgggaaaaggctaagcataaacgtgccagctagtggagtctttatccaccctgacctcatgggagctctggagcatgaattgcatcacaggattgatcctttccacactgaggcaagggggccagaatgctgacctattgtacgtaagaataaagtcgtcattggctgtggtgtttcttggggtagaggtatactctactggacaatgatgactctcattggcagaggtcgattttctagggaaaggggcaactgtgagctgagagtagccaacattcccaacagtaatagcgacaggagacagacaaattcctacgcagacatggacagatccccggtgaaacccggccttcaagccaaggacagttcaaagccttaaaaccgatctgccagttctggatagaatacatagccagagtgagaacttgaatccccactcttgcccactctctcgattggttccttctggatgatgccttttaaccaatcaaatggtgctttttccaagaccacctatggaccaatcagcatgcactcccccattctaagcccataaaaacactcggccttagcctcacagagggctacacactttgggtcccgtcttgcttaccagaggtttcctgtcactcagtaaaattctcctctgccttgctcactctttggtgtctgtgtacctcattcctcttggccagtgggacaagaatctggaatccaccgaactgtgggagtgaaaagagctgtaacaccctctcccactcgctgaactacgggagtggaaaagcctctggatgccatttcctcctgctctccgaactacaggaagaaaaaagccatgacagtagctggggatggcgacactgtcctgggaaaggggatcttggctgggcacaagcagtgttcactattaacatggaactcacctggcatatgggcagcattcaagaaataatagactttgtaattatattctgaattttaatttcattctccatttgaaggagtttatatagctggctttcccgatcttgaagagttgaaataatgttaggttaaagcacttcttcttcttcttttttttttttttttttgcactaatcacatgtagtgattttattttttatatatttttatttttttctttatttcttctaaaaaaaaacaggatacatgtgcagaacatgcagtttgttacatatgtatacatgtgtcatggtggtttcctgcacctattgaccggtcttctatgttccctcaggctaaagcacttcttaacagaaagcatctaaataaaggtaaagaaatattattcaaagctaaaactcaagatattttaagaataatgactaaggaaccactatgttatcttacttccttttgagaatgattacatgacattctgttcatcactttgtattgaggtagaaatgactctgatgattcacagttcatgactctgggcttccatgtatagagacaacaacagaaagagatcccatctatacttatacatgattaatgctattttgttattaatttgtatttaagaatggaggactgggtaacaggatggactcttcatgtcactgtgcccatgttccccacaaggtttcttctggaatggggtgcctggccagtagtgtgggtatgtgggcatatcatgtgatttggcaggcttctttttaggatgaatgaacagggaagtggtaattaagttgctcctctttgttccttgcacctaatatcattgaagatggcctaattctgtcaaccactcataataaaactgcagtaatcccagcggttcatttaaactcttgtgaaaattaaatacccaagtaaaagttggcttactatgcctatcacacacaagtacagaagcaggatggtgagaacggagggaggctagtgtagctattccatgtgtggaccttcagtatgttctcttgtgttctgttcttcccactctccatcacctactttctttctcaacccggaacctctccagggtctcacccagtaggttcccttcacttgcatttccactgcaatcttctcatagttcattctgggctggacttctcccccttctctgtttcatccatcagtgtgctcacatctacttttcatttcatgggaattgtgatagctttcatcttttcattattacttttaccattatggattcaagtcattctttttatacttctaaattttatttcagtgggaatattggaaagataagacgagaatacatatgcttcttaggaattttgaatcagaagcacatcctagtaacatttaaatgttcaaactggctatatgattttgtcttacacataaaaaatctataggcagaatcaaggaatagatcagaagtgcaagggagaactgatttcaggctggcgtgagtgaacagagtacacagaaaggagggattttgttctgaccttgtgaaaagaatccttgttggccaggttctcatttcacctgagatttctctcctcatttggttttttaagttttagggtccaatgatctctatgctaaaataagttggatgaagatggcttcttattcaagagtttcatctttttaggccagaggcgaccgctccagttcaatacagcctatctcccactcacaggggactactgcttgcctagctctgttgagtatcactgtcaatctctcccagattttctatacctcccacaaggtcctctcatttcttgtctgctggttgcattcctcccaattttctgagttaacacaggtttattttacttttcttttcctaactcttcccaggattatttatttgttatattttcttacactcatcattccactcaagtttttccatagatgggcctctgttaatgttctttttagtgtgagatataatttggcatgatgtatcagactgtaggagctttgacaattggaacatgattctttttaaacatgaagtacctaagttgttttttcctagagttacaaatatcgaagttattgacctgaaaccaaggggcctctttaacatttttgcttaacaaaaaaaattttgctttatttgtttgctttgattaattaattagtgacatgtgatccatgctgattttaagtatgagactcaggtctagtttgtttatttttttaagaatcaaataaggaataatctctttcacccaccgtaatgctgacattcagaaacacagggccatatgaaactcagcccagactgaggcaactgatcacctcccttctccttgatgaatggttttacaaaataatatagagtgtctcaatggtattccaaagtctagaatgttgtcttctgtgactagttgctcagtaaagtaaattagtcttctatttttacattactctcatttctcatgtatttaggattaaaaccatgtactctacagaaggtgacgtcatcacagatttgggaagaaagaaacactttctgttggttttgataccacatttctcaaatgagaagcaaacagttcacttccttggatccgtggtttcgcctgtggccttcagggggcgacgttgcactaaggaggcatctgtgttcattgccgaccatcctcatccactgagcctcctccctgcagctggctgatgtagctcactggtgtctgtgtagatagggagctgtgatgagaacaagaggtcagaacacatccaggctccttaagagaaagcctttctttaaccatttttgaaacccttcaaaggcagagacttgtccagcctaacctgcctgctgctcctagctcctgaggctcagggcccttggcttctgtccgctctgctcagggccctccagcgtggccactgctcagccatgctcctgctgctcgtcccagtgctcgaggtgatttttaccctgggttagtaacattccattacctttcttccttttgtaaatgtgactgtgttgtaattttttctgaatagagacatcttttcttcatagcaaagtctgtgctgcctttacttacacagcattggtgttgcaggaggaaccagagcccagtcggtgacccagcttggcagccacgtctctgtctctgaaggagccctggttctgctgaggtgcaactactcatcgtctgttccaccatatctcttctggtatgtgcaataccccaaccaaggactccagcttctcctgaagtacacatcagcggccaccctggttaaaggcatcaacggttttgaggctgaatttaagaagagtgaaacctccttccacctgacgaaaccctcagcccatatgagcgacgcggctgagtacttctgtgctgtgagtgacacagtgcttgagactgcaggagaggtgaacataaacctcctgagatgctgagactttctgtgactcaagaactcaaccttgaagtctgttttataatattaaatagcatttccaagtttctgatgcttattgatgtatgctgtatctttttcatctatttatttttaaactatctgtgactttaaagtgtgtttcctgtaggtagcataaaagaccatcttttctttttatctactttgttaatctctgtttttgcattgtgaagtttagataattaaaatggaatataaatatcaatcaggttggatttaagtatacttcattattgtgtttcacccatgttcctttttttgttctttttttctgactccttttggattatttaaatacttttcaatttacattttaatttatttatgaactttttggctataactctgtactttttgagtagttgctctgaagatggcaatgtacatgcctaaatatccagggtcttatgtgagcaaatactgtacctccttatgtgaaatgtcaaaatcttacacaacgtctctttatctaccaacactaaagtttgttattgttgttcatatatattagtcacatacattgaaaacttcaccaggcctggcacagtggctcatgtttgtaatcccaacactttgggaggcagagatgggaggattgcttgaactcaggggtttcagaccatcctgaaacaaagtgagacccccatctctatgaaatataaaaaaaatagctgggtatgatggcactcatctgtagcctcaactactcggcaggttgaagcattatgatagcttgagcccaggagttcgaggctgcagttagctaccatcatgccactgtattccagcttaagcaatagagcgagatccttgtctcaatttttttttttaaaaatcacaatatatagaaaacttcaccatataatgttataatttttgctttcaacaattatatgcactttataaaatttaaggggaagaataagaactattttatacttaacagctatttatcatttctggtatccttcctttgttcctgaagatctggattttctctgataccaggggatataactgaaattcccttcaaacttaaaaactccctttagcatttcttctagagcagatttgctgggaaacatatttttcatttgttcattacctgaaaatgtatttttaacttgccttttatttctggaagatagtttttactgggtctgtaattctgtgtcaacccttccacccctcccgctttaaagataccatttcattgtcttttggcctccatgctttctaatagaaatccattgccattcaagtaattgtccttcaatgatgtaatatattgtttttctctagctgcttcatatataagctatgtacacacatacacacacacacacacacacaaacacatgaaaaattatacaatcttttgttgtcagtggtttaatcataatgtgtttaggtgtggttctctttgattttaccttgtttggggcttgaattgataaatgtatgtctttcgagagaagaatcaaatagacacaataaaaaatgataaaggggatatcaccaccgatcccacagaaatacaaactaccatcagagaatactacaaacacctctacgcaaataaactagaaaatctagaagaaatggataaattcctcgacacatacactctcccaagactaaaccaggaagaagttgaatctctgaatagaccaataacaggagctgaaattgtggcaataatcaatagtttaccaactaaaaagagtccaggaccagatggattcacagccgaattctaccagaggtacaaggaggaactggtaccattccttctgaaactattccaatcaatagaaaaagagggaatcctccctaaatcattttatgaggccagcatcattctgataccaaagccgggcagagacacaaccaaaaaagagaattttagaccaatatccttgatgaacattgatgcaaaaatcctcgataaaatactggcaaaacgaatccagcagcacatcaaaaagcttatccaccatgatcaagtgggcttcatccctgggatgcaaggctggttcaatatacgcaaatcaataagtgtaatccagcatataaacagagccaaagacaaaaaccacatgattatctcaatagatgcagaaaaagcctttgacaaaattcaataacgcttcatgctaaaaactctcaataaattaggtattgatgggacgtatttcaaaataataagagctatctatgacaaacccacagccaatatcatactgaatgggcaaaaactggaagcattccctttgaaaactggcacaagacagggatgccctctctcgccactcctattcaacatagtgttggaagttctggccagggcaatcaggcaggagaaggaaataaagggtattcaattaggaaaagaggaagtcaaattgtccctgtttgcagacgacatgattgtatatctagaaaaccccatcgtctcagcccaaaatctccttaagctgataagctacttcagcaaagtctcaggatacaaaatcaatgtacaaaaatcacaagcattcttatacaccaataacagacaaacagagagccaaatcatgagtgaactcccattcacaattgcttcaaagagaataaaatacctaggactccaacttacaagggatgtgaaggacctcttcaaggagaactacaaaccactgctcaaggaaataaaagaggatacaaacaaatggaagaacattccgtgctcatggataggaagaatcaatattgtgaaaatggccatactgcccaaggtaatttatagattcaatgccatccccatcaagctaccaatgactttcttcacagaattggaaaaaactactttaaagttcatatggaaccaaaaaagagcccgcatcgccaaggcaatcctaagccaaaagaacaaagctggaggcatcacactacctgacttcaaactatactacaaggctacagtaaccaaaacagcatggtactggtaccaaaacagagatatagatcaatggaacagaacagagccctcagaaataatgccgcatatctacaactatctaatctttgacaaacctgagaaaaacaagcaatggggaaaggattccctatttaataaatggtgctgggaaaactggctagccatatgtagaaagctgaaactggatcccttccttacaccttatacaaaaatcaattcaagatggattaaagacttaaacgttagttctaaaaccataaaaaccctagaagaaaacctaggcagtaccattcaggacataggcatgggcaaggacttcatgtctaaaacaccaaaagcaatggcaacaaaagccagaattgacaaatgggatctaatgaaactaaagagcttctgcacagcaaaataaactgtcatcagagtgaacaggcaacctaaaaaatgggagaaaattttcgcaacctactcgtctgacaaagggctaatatccagaatctataatgaactcaaacaaatttacaggaaaaaaacaaacaaccccatcaaaaagtgggcgaaggacatgaacagacacttctcaaaagaagatatttatgcagccaaaaaacacatgaaaaaatgctcatcatcactggccatcagagaaatgcaaatcaaaaccacaatgagataccatctcacaccagttagaatggcaatcattaaaaagtcaggaaacaacaggtgctggagaggatgtggagaaataggaacacttttacactgttggtgggactgtaaactagttcaaccgttgtggaagtcagtgtggtgattcctcagggatctagaactagaaataccatttgacccagccatcccattactgggtatatatccaaaggactataaatcatgctgctataaagacacatgcacacatatgtttattgcggcattattcacaatagcaaagacttggaaccaacccaaatgtccaacaatgatagactggattaagaaaatgtggcacatatacaccatagaatactatgcagccataaaaaaggatgagttcatgtcctttgtagggacatggatgaaattggaaatcatcattctcagtaaactatcacaagaacaaaaaaccaaacaccacatattctcactcataggtgggaactgaacaatgagatcacatggtcacaggaaggggaatatcacactctgggaactgtggtggggtggggggaggggggagggatagcattgggagagatacctaatgttagatgacaagttagtgggtgcagtacaccagcatggcacgtgtatacatatgtgactaacctgcacaatgtgcacatgtaccctaaaacttaaagtataataataaaaaaaagataaatgtatgtctttcactgaatttggcaagcttttggccattctttcttcaaatatgttttctgacccaatatctttcttctctccctctaggactccagttagatataacttagactttcgaatattttcccacaggtctccagggctctgcctttttttctttcaattttcaaattgattttaaggtttgtcagtgtttcctgaccttggcactactgacattttggtcctcataattttttattggggtgtggggctgccctgtgtgttgtagaatttttaacaacaccactggcttctccacactagatgcctgtagcactacataccccaagttgtgaaggccaaaattgtgtccagatttgccaaatgtctcctgggggaagacaaagtcaaaattaattggattaaataatctgtattgatctttttcaattttgcatatgctttcctctatcattttgctactgagcccttactgtaagatttttatttttgatattgtatttttctgttcaatttctatttttttctttactttgtggaacataatcaaaagagctactttgacatctttttctatgagttttagtatcttagtcatcttggtatttgaatttgttgatcttttacttaaatattagttcatttttctggccctttgtcaaataattttgaagtacatcttaaacatttcaaatattatgtgtgtacactctgttttctcctcctcttccttcttcttctttaaaaaacaatcatctaaagaatgttaatgtttttatttgaggagaaaatcaacctagtttggtttatactactagttgtgtctccccttttgtggaatttggtagctcaaaatcacagttcagttctctaatcatttgccatgttggtttgggtttatacctgtcgtgtgtagctcagggattagtgaaaccagtttgcatggctcaaatctcaggtcagttcctgaactctctgctacattggttttagtttgtcctgcatgggtgccacttgggggtagtctgagactggaatagtggttcaaatatcagttaagtaacctaaaatttgttgttctggtttgagtcagtttcacgtatgtagagccttgggattagcctgagacttaaactattttccatctcttccctagggtctcccttttctagcctgacccacagaggcagaaaattgtgtttcttgcagagttttgacttcctacaccattatcatattgctgtgtgcattggggcctccctcagggcaaagccaagagaaagaaacagaaaaaatatgaaattcacccttgtgcaggttgtttctccaatttttgacttccctacacaatctgctagcttttgggtaatttcagagtccacaggtagtttctttttttaaatttttttattgtttatttattttttattttgttcagtttttacttacaatccatggcagagattggccgtaggtatcttaaagttatctcctattctactgtggtcctgcattaatttgtggttctcgataatattaatcaagaatggctatttggcgtgtgcttttaccaccatctttagttgtattaccctttttagttaatctaattcattttttatatttgcaaatttttctcatcaagattataagaccatttaattaagctcttaaatttttttgatatttcatttcttattttccaaatttatgaaggtctttctttggtgcaaaagaattgagaatgcatacttgtttttataaataattcaagtactatattttttcctaaagtctaaaaatttttgtattctgaattatatctggatttaagagtatgttaaggcatagtaggactattcaaacactattttttttagtacataaaacagagctgattagtttttaattttctctatttttttcatttctgactttttgcttcttttaaatgaaacatgtattttggtatttggggctgtgtttggagacccttaaatcttccgggaaatcatgtatttcttagaatgctgccaacacccttaagtgagaatattctatttatgatcttattcttatttaactaagaggtgttgcttctactactatagaggattgaagaattcctttacattcttccagtgcagagcaaaaggcaatgttccaagacatcacacaatcctatggcctttgactttgaacatactgggctttgcaaatgctcagcaactttgagaaaagttaaaatgaccaccattctgaaattcagaaggagttgctccttatagcttattttccaattttttttctgctctgactttaatcttcaatatgatcccacctactttctgtgtcctagaaatatgtgtcaccctttcctcaccagatgaccttcattttttttttactcttgtgaattttagtctatttccattttatttctattctttaatttaggaagaaatattcaagagaagggaaatgagcatatagcattaggattagaagttcacactcaaaggctacacttttacaaaatgacagcattactcaattttcttcattcaagaaaatcttttccaacaggaacaaatgaatcaagaacccaaggagagaactgggcttatgctttcaaatcaaaggaaagaagtattctgactttgtcaagggtcccattagccacagagaaagcagtgactttctgcattctcgtgttttcagagttttatttttttccccatgcactatctacatttattattatttgtttttatttttaaatttcaacttttatttctcgcttggtgtggttgtatttccttcagccccacaggtgtctgtagttttattttctttacccctagaggcaaagccttcccatcatgagttacgccttgtcattagttgcatggaggcactactctccttatgtgaaatcttttcctctatggctgcacaagcatcatccgagggaaatatctctaccatcctccatcagcactgtggcaacactgaaccatccaaaactcagtccagggcaattggtctgaacccaaactctcatggactcatatctaaattctgatatgcttttcaataacgattcctcttgatgtattactccatctttacatgaaatcttattgctaatggactctaggactaaaacaccatcatagatttggtcaggaagaaacacgtcttgtggaagttttgatacatctcagaaaacaggaagaacacactaatgaacagtctgtgctaaactctggttctgcacttggcctccagagagcgatgctgcacacactggagcttttgtttctgttgaagatcagtccactgctcagtttcttcttcctgcagctggttgagttctttccagacaaagacaagtgacaagaatcagagttttaaaagcaaccagattcatctctgcagcttttgtagttttatataaacaaagagcttgtccagcaaaccttccccacacttcttgttcttggtctcttcagccgctttccttcctgttctctggagatcttgcagaaaagagcctgcagtgtttccattgctcagccatgctcctggtgctcatcccactgctggggatacattttgtcctgagtgagtaaaatttctttatcatctctagttccacaggttctgactagaaatgcttgctttttatactgagtctgcactgctttcactgatagtacattactttttcaggaactgtcagagcccagtcagtgacccagcctgacatccgcatcactgtctctgaaggagcctcactggagttgagatgtaactattcctatggggcgatgttgtgggaagtcagggaccccaaacggagggaccggctgaagccatggcagaagaatgtggattgtgaagatttcatggacatttattagttccccaaattaatacttttataatttcttatgcctctctttactgcaatctctaaacataaattgtaaagatttcatggacacttatcacttccccaatcaatacccctgtgatttcctatgcctgtctttactttaatctcttaatcctgtcagctgaggaggatgtatgtcacctcaggaccctgtgataattgtgttaactgcacaaattatagagcatgtgtgttcaaacaatatgaaatctgggcaccttgaaaaaagaacaggataacagcaatgttcagggaataagagagataaccttaaactctgactgccagtgagccaggcggaacagagccatatttctcttctttcaaaagcaaatgggagaaatatggctgaattctttttctcagcaaggaacatccctggggaagagaatacgtgcctgggggtgggtctatagacggcccccttgggtgtggccatcttctatagtcaaaactgtaggggtgaaataaatcccagtctcccatagcactcccaggcttattaggaagaggaaattcccacctaataaattttggtcagactggctgctctcaaaaccctgtctcctgataagatgttatcaatgacaatggtgcccgaaacttcattagcaattttaatttcgccccagtcctgtggtcctgtgatctcgccctgcctccatttgccttgtgatattctattaccttgtgaagtacatgatctctgtgacccacacctattcatacactccctccccttttgaaaatcagtaataaaaacttgctggttttgcggcttgtggggcatcacggaacctaccgacatgtgatttctcccccggactcccagctttaaaatttctctcttttgtactctgtccctttatttctcaagccagccaaaacttagggaaaatagaaaagaacctatgtgactatcggggcaggttccccaatacggcaacaccttctctcttctggcatgtccagtcccccggccaaggcctccagctgctcctaaagtacttttcaggagacactctggttcaaggcattgaaggctttgaagctgaatttaagaggagtcaatcttccttcaacctgaggagaccctctgtgcattggagtgatgctgctgagtacttctgtgctgcaggtaccacagtgcctgggtctgcaggggagctgaacacaaactgcctatgctagagaagttttcagagactcaatgtatcttcctgtggcattttcaaagatctcttatttttatgatggtgagtgaggcaaagagagctgagcacatccagccatttctatataattctgcaattcctgctatgtcccatgtcagataaactttgttttagaagctttttgttaattgaagaaactgcataataggaaatagtattctagaatgatggaggagacatacttcttatcacctaacaatcaggttctcaaggacctttccttgactgtgactgcattaagtggttgactatgggaattttgatatggtctaggagaaccttggttttcatttatcatttaatctctcaactaacccagaaaacaaaacataagtttctcatgttcttaccttgcaagttgcatccttgagctggtcattcacaggatattttcttagaatttatttttctggctctaactgcgcaattcagatttcaggatattttgtctcatacctctatttaggaggaattatgagaaattgttagctaacagtgaaagtttcattagaatcacgaaggacttagaaaattgtcacagtgatgtgagttctggcaactaggaatagcacacaaggagaatgaagatttagaattcatcagtgtttctccaaagactttttcagttataaaaatagcttctattctattggtatattaattatgcaaatctacattgtaagtttgtctatggaattccattcatctcttctagctactgacacttttacttgttgctttcactctgttgttacatggtttcactattgaaatattaaagattgattctcttttttgagatagagttttactctttcacctaggctggaatgcagtggcatgatcatagctcactgcagccttgacccatgcccccaggctcaagcaattctcccacctcagtcagcttcctgagtagctgagactacaggtgtgcaccaccatgcctggctaattttttttttaatttttatttttagtggagacaagatctcactatgttgcccaggctggtttcaaactcctgagctcaagcaatcctgcaacctcagccccccaaagtactaggattacaagcatgagccactgtacctggccaaagattgattcttatatagtaacattttgataatctgtcatgtggtaagttttgcaatgccaagctctgctagaaatacggataagagttacaatggtactggattccaggcggctgctggaaagtataaatatgtgactttcttatgtctagaatggaaagaactgtataagaagattttatactccttgtctgcttgctgcctcggaggataaccagtgcttcggaggaaaagtagaaggagaaggagagagctctttagctgccatttagctcacactataaatgtctaagagggtaggtgcatagggaccctgaaaatatagatcgaataagtaaattgtggccaatggcactccttagccaaatagtgaaccaagatatcaacagtattttttaggatgtagtgttatgagtacatgtgataaatatgtttaagcgatttctggaatgctgtgaggaaggtgaatggagtgtcagatatataaaattatgaaaaagaaatgtatgctcatttaatgttcctgcctcagtcccttccttcttttctgtttttggaccacactctcatctaccactgataaggcaaataatttcaagtgactcattgtcatcagctcagccacactgcccaaaggtacttgtcatagtatcatgagcacttcatgcagatcgatttgagaaagaactgcccgtttcttttgattctgatctcaaactgaatattaaagaaaaataaattccataccaaggaccctgagcagctgggagagcattccccatctcccctacctcacctctgcctgaaaaatcaaagtaatcttccttccttctattaataatttgttgcttttatatgagtacgtgatttgtaggagaaactttccaaaataaggaattatattaagaaagtggagattctgagttattttatcaatgatatcaatcattctgacttttcagaaagaattctgacttttcatgaaattaactgatcttaccacatattccatcaccgagaagcagctgccctaattgaaaggcggaacactttactgaagaccaagctagagccctgactgggagacaacagcatgtatgctaaacattttcttctctccctacatcgtattttttatctgatatacaagctgttggaaacaaactttataatttagtgtaaaggtaacagaattttcaggctgggtgaggtggctcacagctgtaatttcagcacggtgggaggtttaggtaggaggatcacttgaggcaaggatttcaagaccagcctgggcaacatagcaagaccacatctctacaaacaattaaaaaaattagccaggcatggtggtgcccacctgtagtcctagctactcaggaggattgcgtgggcccaggagttcaaagttacactgagctgtgatcatgacactgccctctagcctggatgccagagcaagatcctgcttttaaaaaaaacttaggaaggactgtcactgaatttgaagaattattaatataatcagtgatgaagtcaatgacttttgggattgtgcatcttctcattttggagaaaggatgaaaagttcttcagttgcaagatggagttctgtatcttgaaggagatagaggaatagaattattttgttgttgtacatgtttcaaatgtttgtagaagaatgtgtgtgttgcatagggaagcttgaagtagttgaaggtatcgatttattgactctcagctccaaattcactccttgcctcttctgtgaaggtgaatctggaaccttcgaccatttttctttgccagttgacacaatgttaagctttgtagtagagagtcaggaagaaaaagttttgctttctgctttccatgtgctcactcatcaggatcctgcaccatgggaggcacctgcagtgcacagtgccctgcagtttcctccagaacccccccattttagggcgattctgtgaaagagatcctgcagtgagacacctccctgtgaacagctttccccagtgtcctagaggatgattttctgccatgttctagagggtgaatttctagcaagttctgctgggacagcaccacagcaacttccctttcatccagtgagccacagctgtttcttttcaataagatctgggtctcagccctgagggtggggctacaggcctcttccctggttatcctaccctgccctaggagtagaggctgcaccttatgtctgctattcctacaggaataggaatagcagaatttcttttcttcatattattcattctcttgttactctaatactctgtttattaatccttaaattttttctgttgaaattctatggtttctctttcctgattggactcgacttagacatgcaccaaggacttcaagcaactggagagcatcttccatctccccgcccactcctgcctgagatatcaaagtagttttcttgttttatttctctattgatttgttttgcctgcttattgttttatttacattgttgttatataattatgagaaaattttacaataattttattaagaatttggaaatattgttaatatattaataaaattaattttactattaaaatttttgtgcacattatacacagaatgttattataccattggtgcaaattgaaatcaattttaaaaggtttagcatactgcacaaataggcattaattcacctatgaggatgtgtctggagatcgtaattctaagtcatttttcttgcatgtaactctctcaatacatcattattttttgattttctatttccttcagatggaggaagaagacaatgataattgcaaaactatctgtagacagaatatttctgtcaccccagaaggttttatgtgtgcctttctagtcaactcaccttctggaggcaatagatgttcttatttctatcaccttagatttactttacccattgtagacttcaaatcaatggaatcatacagtagttactcttttgtgcctggtttctttcattcatcgtgttttttagattcccccatgttctcatgtatatcagtcattcattattgctattgctgagtagtatcttattatatgaataaagcacaatttgtttatccattcagctgcgcacaccactgactggacatagaatctttcagggattaaatctttggtatcattcttaagagtgcaaggtacagttgttctagatttttctatcctgtctttcaagggtagggcgtgtctctaaaatacttcagttgaaacatgtatcttaaatacctttatttaaaaaccaatttctatcattcattatggtacctactgtatcattagttttgcaaataaaaacccaacatctaatattccctatgctatttagcaaagctttgggtattatccaagctgtgggtagctgaactgtagtttcctctgttgtggccttacgtattaataacaacagtagctgaccaccctggaatttgctttcctgactaagtcaattgactctccttagagttgagacttaactagtacatatccaatattctctggcttttgtcgaaaagatttaatgtaaattatacatcctaacactgtgatatatttatttttacttggtaactgatagatattatgaacaaaatttagatcattgttcctgcaggtcctgaagatctgtaagtcatgtaattataatccttgctcaacagttattctagagaacttatttaatatttagaggcactttgccctttacagtacatactaaaaccttttaaagcttgttaggtaacttatgaagaaaatttcactaatctattatttaataccaaatatacagcatatacaatacacattttcaatcttttaagcacattaacaaagttctcaggatagttggatctctgtacacagttttttacaggaatatctaagacaagggaatacctttatttaggacacaaatgcgccaaaacatgggtataaaagtagaatgtggccaggcacggtggattatgcctgtaatcccaacactttgagaggctgaagcgagagaatctcttgagtccaggagattgaaaccagcctgagcaacagaatgaaatcccatctctacaaaaagtaaaaaaacatcagctgggcatggtgacacatgtctgtgatcccagttacataggaggctgaggcagggagtattgcttaagcctgggaggtcaaggctgcagtgagccgcaattgcaccactgccctccagtctgggaaacagagtgagaccctgtctcaaaaaaataaataaataaaaataaaaataaaaggtagaatgttaaaatgttgaagatagtttatatgtatatttataacttcatattgttttttgtgatatgtcttatataataggaaaataaaattgacctttatattaatattctaaggctggcataacaaaatatcacagactaggtgacataaacaacataatttattatctcacagttccacaggctagaagcccaagatcaagttgtcagcagggttaatttcttctgaagtttgcagatcatgttgccttttcattgtgtccttacacggtcttgcccctgagggtacgcatgtctgtgtccaaatttacttttcttataagaagagcagtcatattgaattagagtccacttatgtgatgtcattttacattaattatttctttaaagagcctattttcaagcaccattacgttctgaggtactgggggtaagggcttcaacatgtaaattttgggttggatagagctcagtccataacaactctccaagtaaatattacgttcacaaacaagacagttgaaacctttctttgtgcaatgctttactaacttctcgtgcacacaatgatcgtgtataactttgatggagattttcctgtattgagtttctttctagaggaaggagaaatgtgcaattacaaatacagatagcttataagatattctacattgcaaaagaccagtgataaaaattaaaagctgtttttcagacttgccttctttttcctctgctccactggggtgcagaattctctcatgtttagatttgttcttttctgaagataaatcttaatttctccttggtattttatctctgacagttttcctttctttccccattccgttttctgtctgcatgttacttttttttacctctgtcttatcgtttgtctaatattagattctacctgtgcagaagccaatttagctaacttgctgtttttctcctgcactcctcctttaccacctcatcagcagaactgacatttaaaaaagaaaaaagaattgaaattcttttgaagttgtttagggcaagtgaagcgggttaagtggatgaggaaggtggctacagtccttaaacacaggggcagcaggaagaattccatcctatatgctcagctttcttgaggattgttttctgttttttttttcaagtagtatgtatcaatattttaaattttgattcaaccagataatcttttttaaaaaatatatgctttggttgctgacatgcttggattcattttaaatatatttgttttatgcagcattctcttgatttttttcttatttctttttagcctggcttctcttgcattgataaagtttgatttttcttcatactgctttgaaaatgtaatgtgtatttctgttatgataagtacccttgttatataaatgtatgtatagaaatataaaatacatatgaatgtatgtatatatgtgtatgcatatataaatctaatttttatgcccaatgttattcttttttttccctcagtgttattctgtaacattttgcttgtatatcccagtccttctcctttacctcctgctgacttatgaattttagaattaccttcgtggctgattggaagaaactacacataagctatatacatcaggacaataatttcagtaagatattatgaaatgaacaataaactatagctccaatgtacattaagaaaagtaataaaaaagaaaagcatccgacacaataattgcaacatgaatttgctcccttcatcctcagagccattgtccctgatcttccttctgcctggagtgtttttcaccattagccacatagatcccttcactggctcatagtctttgctcctggagaaacatgggaacatgtgaataaagtagaatgctcaaaaagtttattgcagcattgtatttcatagttaaagaaaaatcattgtattagtccattctcccactgttataaaaatgctgagacatgataatttataaagaaaagagatttaagtggctcacagttccacagaccatacaggaagcacagtagcatctgtttctggggaggcttcagggagcttttactcaagatggaaggtaaagagggagaggccgtcttacatggcaaaagcagaacctagagagaaagggaaggtgctacacacttttaaacaaccagatctcaggagaactcaggactgtagcaagtgggaaatccacccccatgacccaatcacctcctaccaggcctgacctccagcattgggtatggaatcctgattagggaaaaggagtcaggctagcaggaccaggggaaagcaaagggataaagaaaataagctataggtctgcctttttttcatggtccaggacatataaacagaaagaggaagcagataagctataggtctttctttatggctcaggacctatagctctcctgagcaaataacgtacataactcacagacttcctgcttatcatcaaacacctctatctatcatcaaaaacctcagttgacagaagaatgcaagttagttccttgctaccttggcattaccagtactgcatgcagcactcggcaacccaaaaacatcctataaaatctccagcaggcctttgtttccttgccatcagctcctcttcggctgattgctccctggcaactactttcatactttctttaatagatctgcctttctttatctacaacagtcttggtaaattattttatccccacaccaccagcccaggtagtcatcactcacctgggacattggggattacatttcaacatgagatttgggcagggacacagatccaaactatatcacacatcatcttaagtcttcatcaatagggagaggactatataaactgaagtatatctctaatagggtgcaatgtagcagaagttcccgtatgtgttaatataataagctctgcaagatatattattgaatttatagtgtgagttacaaaaaggtatacatgagatgcatcatttggtattaaattttaaaattataaatgaaatactatttattttcagcattttttgtatttagtacatgtatataatgctatagtaaaacatttggaagtatcaactccaaattgataagatgaagggagaattagggtaacgagtgatgaaagaatcagaactgggagtggtagtaaaagtggattttcgtctacctggtatgttgtattacttttaataatttcaaatgttcatgaattctttataatattaaaccaataaaaagtcataaaagccatcataaaggtttatccatattctattctattatcctcatgaaaaaggagagaaagagggaaatgaccaccctttttataaggtcttgtccaaccttcctaagtatttctcccacctctgggatcatatagcttttagttcacattctgcttaggatcccactctttgattctattatagacatgtgtagttttgtactcttcagtagattatgaactaatgtctcatcactttttacatactcttaaaacctaataaattaatcacttatggtaatacttcaaaaaatctttttggattttctaaaacaaaatcagagaattcaaataaatagcgcaagatgggaattgtcaaattattttaagatattaatttccatgaagtggcattttaaaagtggtaattggttcactgttaatccccattcagtctaggcagctatattgttttctgaccgcctccatttccttcataggaaacatgaagtgaatggggctgtgtgtgtgactactgaggagttaagttggtgcaaagtggtctttgttgatggtttcagtccactagggggcactctaggacttccgaaatgaagactttttctgatggtctcagcggacggaacaggatacaaaagggcatgtgagtcagtcaaatcacagataacagggagctggggcggggtggagcgtgatgtgtgtgtaaggttcatcttaggttttcagctctgacattctatataaaacctcagaaagctggagttcataggtctataaatccattgtgaggatgattctgtaagcagaggtaagggaattggagttttactgggcattgcgagcatggatgttcattagaaaacatcttcattccatgttttcagtttctaaatttttatgattaaaattcatgaaattcactgacttggaaattattctaaatacccctgatatctgatcttttcatatatcttctctgagactagaaggaaaaagaataaacagaagagaagaaaataggaataaaataaggatgaagaacagaaagagaatagggaggggacaatatttaatttgaccagcaatatgtggcctgatgagaacagctgtgagggcctgcagggtgtgtggggaaaggtctgggaagaggaaggggagaggtagaaatgcaattagagtggatatcatacgcacatcctatttttcctctaaccaaccaacctctagttggaaacattttctaatgccctgatttcaagaaactatttatttctaaatttgcaatgcatgctatcaaatagttttcctttattagaattttcatatatttgaattctccaattttctgtcaaactgtgtaatttgggaaatgggatctctcttcccatgactctttaaagctctatttaacctagctgagacacagattcttctgagaggtatcatcccccttcctcacatactatccataaactagtcttacataaagtgcttcttttttttaaaaaaaacctatatcttcatacattagaaatattgcctcttcctctcgtgaactattcacacccatgaatttggagagattgctgtgcagtctcactgggccactgtgggtggtttcctcttcagatgatttttaaaacttatgtttttaaacttaaaaacttttaaataaaagactgatcatgaacattgcaataaggcaagttgaagagtacctgaatccttcaaaaagtttagaaactctagtattgaaaattaatacattacaatttgaatatctgcaggtttcaaaatagaaattaaatctaagtgtagcagcttgatagaaaggaacattattttcatgcaaagttttgaatgacccagttatcgacatagaggctaattttcaaatcaatttttcttataattgaagatacaatggtaggatgcacaaacaaacatagtgaatcatatacatatcatgaagccactttgttacttttttaaacaaatttttttttaagagaagtggtcttgctctgttgcccaagctcaagtgcagtggcacaattatagtttgctttagccttgaactcctgggcccaagtgatcttcctgtctaggtctcccaaagtgctgagatcacagaagaccctgtctctgcttctgaaggagcccaaggattggttagggtaagctcagacccactagattgcctgtgggtgtgaaaatggtcttgggagttccttgatgcaggataacttctgcctactcccatgctctatgctgtacacaatcagtcctcagtaaatatttgccttgttaaatagtataaaagaattttagacctataaaagcatttagaaaccttttagttcaacttcattttataaacacagaaactatatccaagatgccagtatgaaaccattagatagtaaatgatctagcagtagaaagaaactggatttcctcccttcctccttagcttcttgctcttgcctattcctgcaggcacatattgttgaacaaagagaaactatctaatggcagccctgccaggttgacctctgcattttggttccgggaaaggcttggttcaatcactttgaccatgagaacggagagttccagtttgtgtaaacatttaccactttgggcaagaaagatattcaggctgagccactgttattctaccaggaaatccagtccatgactcactggctgctgtaggagtgagccaaacatggtggtgccaccctcaacccccagaggtatttctaaggactttcctaaaaatagtaagatatattcattatgctgggtggatattccttgaaggaaggatgtggacatagtgagcattactctacattgtcaaaaaataataattagaatagggaagctaagggtaacatgtcctcaagtggttgatagttcataaaggtgtgagaaaatcttttctggaccaacacattgacaatgagttaggtaatattcaatgaaataatcatagggttgggaattttgtccaggggatggccatacctaaggcatagttaatatgtggaatactatgatccatatgagtggtcatatttagaccattacattcagttcttaatgctatactcaaaaggccaaatattgacctaaattatctgtcaccaaaaggagggaaactcatccaataaaggatttgagaattatattgtatgaggaatgagtgagaaaagagaaaatccttagaatggagaagttttacatatgtaaaaacacacattttatgtatacatatctatatttatatgttttagttgctatttttcatcataactgtccttacatacttaagggtgcaagatgtgaataagaaattatattcagtctttataattccaggggcctagtgagtacaagtcacaggaaatgcacttttcttctggaaaccagatagtcttggtatctgaggaaccatttcccatggtcacttatttagttttgcactctccctcctagcagacacaggcaatattttggcttccatagatttagttttatggaagtaatcagaacgtatcaaaaattaaagtagataagcaattttttttgcaagaagagataaacccagaaatgtacaagactgaaggactttatcaatatcttagggaagaacactgtagtggagtttgggagaaaaacggcagatatggaacctgagctagcaatggctaaggcaagagcagtccatgccagaggagttggctcatattttagaggcaagttccactgaagatatgagtcaatcattgtatttaaggacatgccatattgatatcattcattttggtatcagaaaataaaagcaccttaatagaaatttacatgtggtttcatttttggagcctgcagcctgatgttttctgagaatttctccttgttttttctgcactttgcagaatacaagccacatagcaataggaaaaggtttcttaaaacatgccagatttctccttgcaaaccagcccaatctatgggtcaaactttcctattgttggagtatttaataactcatggaacttgttcccttcctcctttatcattgtactttaattctttaccttttattaaagccatccttaccaaagaaagattccacatttcgactgttggtactgtcaagtctctgggaatagaaagtcatggggaagaccagtcttggagaagcagagcctgagataatatgcacgtgaaatattgagtagtcctctctctcttactcttatctttggcttacatattcctttaagaaagagtctttctccataacaaacaaatcatgatgaccgatttgactgcaagggaatgtattacttttgtttgtccaggacagtgaatcatggtgttttcctgatttcaaacatgtaaacttggtgcatcattgtataaacacctgcaacatctacctctttctaactttttaacaatgactcattagtttgcataaatatcaatcttgatatctacattcttactgtgaacttcatctcagagtgaagactttatttgtttgacctattgctccttttgtgcatctgagtccctcctagggttatagaaaaacattcaaactgcaagtttagtagctacgaatgtgaccacaagatggcagtgcttctctgctgatgcagaacacacagaggtttcattttagtggattctgattaaataggtttatggcagaagtagagcctttttctattggctgagtagacaatgtgagaaaccactatgattgttagaggaaagaaaggaatacccgatgatggaagtagctcttatggctggagattgcaggtttatgactgatcctatttgggaagaacaatgatggcaggcattcgagctttatttatgtacttgtggctgcagctggactgtaagtttagagttttgggtaacacagtatattagttgatgattttgagacatccagggggaagtcttgctttatttaggcttcctctagttactatagaaaaagaaaattctggagaataataacttgataaacctttctctttttctttctgcacaggggtgagcagaggagagagtgtggggctgcatcttcctaccctgagtgtccaggagggtgacaactctattatcaactgtgcttattcaaacagcgcctcagactacttcatttggtacaagcaagaatctggaaaaggtcctcaattcattatagacattcgttcaaatatggacaaaaggcaaggccaaagagtcaccgttttattgaataagacagtgaaacatctctctctgcaaattgcagctactcaacctggagactcagctgtctacttttgtgcagagaatacacattgctttccaggcatctgtaaccatcacccaaacctgagatgggaggtgaagcagcatccctttcctttgcaataaattttagttatagcacttgtcattttgtttgttcataagtggaaactaacatatagatattaaaaccatgtaatgaggttagattcaaagtgacccagaaaggtttagagcattttgttggccagttgatgcttaatggattccgtttttcaaaaaaatatatggtacgcatttaagttaacaacatgaagttttgacacacatgtacatagtaaagtaaagagtcagctaaagagacgcatagggcaaggtatgggaaaaatggccctgagcttccatgccttctctggctctgccacccaccacatgttcagcaatcaggaggttctgctcaagggatccttacagagatttagtgatgttggattttgtaatctagtcttcaaaggtgactttacatttgctattcagacttctctcctatgaataaccccttagtgtcaatattgcaatccctattatggataaattttaacttttagttttcaaaaattgcttttgttatctttttcttattgtaaaacattacatgccaaaaccagatagtgtaaaatataaaaaatacaaaattgataattctgtacccagataggttttgctaatattaggttggtgcaaaagtaagtgctgtttttgccattaaaagtcatggcaaaaataacaattacttttgcaccaacctaatatttagatttgtttcttgatagagtcctattataattaggatcatgattttttcacctattcttatatctcgaattgagcttttctcacttcgtcctctcctcaaacacatgctttttaatagctccgtgagaaattttcaccagtcacagttatttttattttcttactctctgtatctgtggtaaaatttggcagtcccttctacctgctgtttcttgttgggaaaacgtgatgagttttcctttagagtctagtttggacatatactctgtgtgtgcgagggaaattaaaacaggaagtgattttaaaatgtgagcttcagattagagtcatcagtatattcttcaaaatcttattggtatctcttcatatttactctctcacataattgagaagagttatgttttttaatcactctgtttctgcagaacctagcataagctttttcacattgttaataatcaatagatgtttgttaaagaaagaaaaaatggattaaactattgtatattcaaaattttaacttaggctttgtggttgaattaaacgtataattttatgtgtgaataattaaactcctgaaaatgtatatttgaataagttgaatatttgagagcatatttctttccatttatctatgtcattcttttccataaaactttatcgttttaagataattaaatttttttctagacatttcatttttattgctacctttatctttctttctgaggtatgtggcaatgtttttaataaatatttttcagctacattattcaattcttattagtaaattgcaggaggcatttggatagttaatttatgctaggttgttccaaataccccgcctcactttcgtgttttgactgctttaaacattacgagtgcagtttccttttcaaaagttgtatcttttcgtgttgttgataaaaataatggaaataaagaagttgcataaataattaattccctaattctcccacctgtggtcaagagtaggctaatttcaagatccctcatattattcctaaggatggatataaccggcgattggtagggtgagaatgatcccttctggctgagttatggctgttagttattagctaggtcttataggaaaagtcattagattaaattggggtttaaaaacaactgaacaaggaaggtcagtattgtagcccagtaactcaactggcttttgttatttccctgtctataccactagctcctctccggagaagcaagctgactcttgatcagtccatttcctccaagaatgaaatggagtgattgggaatcatggcttatagtctatttattttttgcttgtttagaagaaagagtgtaattgctattggcttaattgctgtatcttacttggttgtcaatttttccaatgtaagaaaaaaaattatccagctagagtgtgcaaagtcagtacccagcttagatccagacacattcaagcattaaactttaaatggaaaagagtactgatgaggagagacattagcaggtaataaaatttactataaaattaccttctgaggttggcatacaatgaaacagatcaaaggagctaaataaaacacattgaacaaataaaccaaggtttatgtatttttttgttgcctctgtacaaacttgctgtcttaaaacaatagatacatatttttttaaatcatcttcactgggctgaaatcaaggagtcagtaaggcccgcttcagaggctgcagagaagaatctgttccttgcctcttctagctttgccagcatttcttggcttgtggtgccatcaccccaatccctgttgctatggtcacattggcttttcttcttatgttgtcaagaacacatttccacaagttcaaaggcaatatttctttgaaaatttttttgaataccaagtcacccaggtttaggtaaagtaaaagctgattaaatgaaaggccaggaaggaaaacctgtacctgttggttaaaggactgaatataatgagtttatttatctattaatagttaagtgtgtcagaatggaatatgtgtggttcagaacattctgagtaatatgggcctactagtgaccagttcatagtgagatgacacatgactttgggatggggaagaatgcagggccactagagctaagggtaataatgctttaggccacgggagttcacagatgtctgatagggtaactaattttattcttaatagtcatacattgtttcaacattttcagaggaccaggaggtgataagaaaagcagtttctgagtgagagcaaaaccttacataactgtcctagaaaaacatgttcctctacatatagataatttgattggcacagataaaaaatggaaatcaattgatttagctattgtgagtgctgtatctttatgacgggtgagtgcttcaacccatgtagaaaataaaacaactcttactagtgcatactcacaaccccttagggagtagaactgtctgaaacatactcaactgttcccttaggacagtattccagttcatattccacttttacagttttcatggaattttggagcttccaaaaaagacatgaactgtctgcattccctagtattctagaaaagtctccccacaaatgtttaatattgcagtcaacatgtccctactgcgatgggtggtccctggagggtattaacaagtgttcattggcaatcatctggttccaccaaacagcctttctggctttgatatatcttatcctcactgatcaaacaaatcaataattcatctaaggtggagttattgacattttccatggttgcatctttaagttccataagaggtgcttgcataaggactttagtcagaaagccatgtttagcatgatcccctgctcacgtatttttttctagcttctaaagtgcctttcatacatggaactttgtcttcattaggaaatttatttcaatagcgtcaagacatcaaataatttatgtatttggtgtccatttttataaagatacatgaaatatatgagaaggttaagaagaggtaaaggaggttaaggaacctcatcggctccattatatttggaagttgtgacctgtgttaaagcattgactatcactgtttatatttatcataatttggcatgcaaaaatgagagtcacaatttcagccacttgcattaattttacttctaagagattgaattttataatagagtcgggtagttattacataaaaagttttgcgttattccttttcaactttgagtttaatacattaaaacaattaattcagaagttgatacgagactgttcaaaatatctgtttgagtgtggacacttcttaaatgacaaaagcacagttaaaagatttattgattgagaagtgtaatggagttgaacactatgaagataaatttgtaatatttcataattactccaccaactggtagaacaaataatggatgcttttacaaaatagataacttgtactgtacgtgatatcataagatatctgaagacgcttcaaccaattttgacaagaaagatctgaagacgcttcaaccaattttgacaaggctaagataagctattttaagacaagagcgataagctatggctactatattaataaataaattatggtaggcaaggcaatgacctgagttgtttgcagtgttgttgagtagtatcactagggcatggtctttaatgtttacacagaaagaaaatttgtcacaatcggtgatcctgtaatcagttgtcctgtatatgggatcgtccagaacacattctcttcagagcggggcatacagaacggcgtggcttgctggggcttatttggagtctgaattgaagtcatggaaaaaatataaattcgaaggtttgataacctaataaccaaactctgtaatctaatatgatctgtatgaacagagctggctgttgaaactgaatagaaaagagaatgggacctttaaaacacaacttgatatctgaggggttaattctaaactcttcgtcaaagagagattcgtttttctgctgtttggccccaagattggcaactggataggcattggaattgaggaggaatactgttatatcaatagataagtcaaaagatctgcagagatttgtacaaaccttcttatcataacatgatgtatttgtactttaggagaaacaacaacatacatagatgtgaggctagaggattattgtatcttacattgtctgtataattcattacaggtatcaaatatgtgtcaatctcccagttccatcacaggtgcaatgataaaatacagtagttggtcaaatgatcatttttcctctcaatgtgaccatgtttattttcagatttgttaacaaattaagagttggttgatccaaaagaaagtctgcattgggtgagcttctcagccagtacatagagaagtgtgagatgacacacactagtttgctataccaggaaacctctgtttcctgttctagggcagcagtagcagcagcacatggcccagtaattcttctctcaccatgccaggttcacttcacagtacagagtcctgaaaataaagaagaaaatttttttttatctagaaaaagaaccaaacatgtcactttctagcctgctgaaggtggtcacagcttcactgtggctaggtatgggtggcccagtgggaatggactttctgtatgaactaaggactttggaagtatctttatggaaactttgggaaggaggggtaatggggtacaaaaattgaatttctttgtcccaatccactttatccttaaaccttcaaattctatcttttttccttcaggacctggcattgcccagaagataactcaaacccaaccaggaatgttcgtgcaggaaaaggaggctgtgactctggactgcacatatgacaccagtgatccaagttatggtctattctggtacaagcagcccagcagtggggaaatgatttttcttatttatcaggggtcttatgaccagcaaaatgcaacagaaggtcgctactcattgaatttccagaaggcaagaaaatccgccaaccttgtcatctccgcttcacaactgggggactcagcaatgtacttctgtgcaatgagagagggcacagtgacagaactgtcggagggaggtgtacaaaagccctggggacctgcttgagacctccacctgctggagaaccaaggcgggaaatcaacatcacagacaggaagtggctacagctgtggcagcccagatgcagtgttgtaggaaatacacttaactctaagaaaatacctctttaagttcatagaccatgatcaaagttatcattaactaaaaactttcttatccctgaatctttggtttaaagtttagacataccaaatttgtgactgaagattgaagagaaaaaactgccacaataaacaatttgccatttggctactaaattgaactggattcaaaaacatgtgactgaaaaatcatttaaaatatctgtgaattttcatatcaatttgttcagtaaatactggagatctaaaaaaagttcatgaaaaatacgtattataaaaactatttttggatttcaatttttttttgcaccaaaataaacttacacttaaattgctataacatatgtagacaggatctactttgaggcactaagaaaaataggacagcaatttgaaaagaacccctattagagcaacagattctgctaaaatgaagcaaaggaaagcttcacatttatggtgaaggttgggtagtagaatggtgaaatcatcaattctctatgaaactttacgaagtcagtgctccaaataaatcagcagttagcaagtggataactcattttaagaagggatgagacaatgttgaaggtaaatcctgcagtggtagaccatccacaccaatttgtttggaaaaagttaaccttatttgtgccctaattgaaatggactgatgattaacagcagaaacaatagccaacaccacagacacctcaatcggcccagcttacacaattttgactgaaaattaaagttgagcaaactttccattccatgggtgccaaaactattggacctagatcagttgcagacaagatcagagctttcaataaaaattttaagcaagtgggatcaagcccctgaagcatttctttgaagagctgtaacaagagataaagcatggctttaccagtataattctgaaggcaatgcacaatcaaaacaatggctaccaagaggtggaagtggtccagtcaaagcaaaagtggaccagtaaagtgcaaaaattatggcaatagttttttgggatgctcaaggaattttgcttgttagctttctggagggccaaagagcaaaaacatttgcttattatgagcatgttttgagatatgtagccaaaactttaggagataaatgcctaggaaagctccaccagagatttcttcttcaccatgacaatgatcctgctcactcctctcatcaaacaagggcaattttgtaagagtattgatggaaaatcgttaggcatctacatagccttgatttggctccttggacctctttttgtttcttaatgttaaaaaaatctttaaaaggcacccattttcttcagttagtaatgtaaaaatgaactcattgacataattaaattcccaggaccctcaattatgcagcaatggaccaaatggctagtatcactgcttacaaaagtgttttgagctcaatggagcttatttcaggaataaggtttatattttttattttgattttactttacacgaaccttttgaaatgtccttgtatttattgtgttatagacattattttaaataggaaaggcattgaaatcttttatatttcccttctaaatatattatgttgtttatattgtttaatggattaatttgatttaggtttgtttgctgtgagtaaatggtacttaaacatttattttctaaaggtgtctactatgtgctaagagctcctttcatcttattaacaccttgaatgtggaagaaatcagtctccatactacagatttacctgcctctcaacattcctatccacgaagtgatcattatttagtggcttccagaaggacatgtggagaatgttcctcacagaggcacaaaccttttcatttatatattaataagacatcttttcttctaaaatgaatcaccatttttgaaatatatgaaatttccctttccctataatgtttccacatggtttatttcgttccactgatctatttgtttcactctatgacaatctcagaatgtagttttatagtaaattttataatctcttagggtaaatcacttttcaccaaaaatctttttcaagattttaaaaaataattcttgcacatttacttttcagtatgttaaaagttctgtcacattttcctcatgttcaatacccttctattaaactgacaaaacaaaaatgtctaaaaaccagacagttgaaattgcatttaatgaatatgttaacaaatatcaacttgttttcgtatgtttttattcagtaaaatgatattttttctaattgtaaaggatcttttatgttctctattacattgtgaagtttcttacttttatcttcatatggatttgtatataactgttcccacacatccatctatatatatgcattttaaatgaaattatcttttatatattcatttttactgatattcccagtacaaacaaatgctatttaaaaatcatcttggttatatagctaagagtttctaactttaaagtacagataatttgcaatatattcatactacttgaaccattaaagtttattttatgaacctagactaacctcaacccaacacctaaaaaatagcatgataaaaatatttactctccaatttttttttttaagacagagtctcgctctgttgctcagactggagtgcagtgccactatctcggcttactgcatcctttgcctcctgggttcaagcgattctcctgcctcagcttcctgagtagctgggattacaggcgtgcaccaccaccacacccggctagtttttgtatttttagtagagatggggtttcaccctgttggtcaggctggtctcaaacttctgaccttgtgatctacccgcctcagcctcccaaagttctgggattacaggcttgagccaccaagcccagcctactctcctattaaaaagtcaagaaacaacagatgctggcgaggctgcggagaaataggaatgcttttacactcttggtgggaacgcaaattagttcaaccattgtggaagacaatgtggagattcctcaaagacctacagccagaaataccatttgacccagcaatctcattactgggtatatacccaaaggaatataaatcattctattataaagatacctgtacctgcatgttcattggagcactattcacaatagcaaagatgtacaatcaacccaaaagcccatcgatgatagactggatgaagaaaatgtggttcatatacaccatggatactatgcagcaataaaaataaatgagatcatgtcctttgcagggacatggatgggggtagaagccattatcctcagccaactaacacaggaacagaaaatcaagcacctcatgttctcacttataagtgggagctgaacagtgagaacacacggacacaggaaggggaacaacacacactggggcctgttggggagggaggcggagggaaagcatcaagataaatagctaatgcgtgtgaggcttaatacctagataatgggttgataggtgcagcaaaccaccatggtacacgtttacctatgtagcaaatctgcatattctgaatatgtatccaagaacttaaaagaacatatttaaaattcattgaagaaattgaacatatatttgcaagtgtcccatgccaatataaaacacattataataagcatgtatacatcttattaaatcagaatgaatatccatatattcatattcatataacttgataaaaaatagcagttggatacatagtattaatttaaaaattctagttttaaaatttataattttagatttttaatttaaattttaaatttcaaatttttaaaatacctcattttatttctgatgtctggaatcttatttagttgaaaatgtctctttgaattctctgagtaccatgagcttgtatagcttatgctgctgcctctaatgtagctgctattgttttcaatatggaatgaacaaggtgattggatttcttgaaccacttactataatagaacctctagatatttctaccaaataaagagtagagaacaaattaaaatacgccaaatgtatttttacagctactttcacatctattagatggagtctttcatagacattttatgaaagagtttcataatcctcacacttgttacaacgtacagtctaaacaggcaagatctattcactctaacataatatctaagggatggtgtgaaggatattgcaagcatatacacacacacgcacacacactcacatctcaccacaagttagagtttacagatagcggtttacctttgaggtagttagagagaaccagtaaagaagtcacacatattcagcctaataagtaattagttcaaatctaatagaaatgacatctaaaattggaatcttagaaacaagactctactaaaagataactttggaatgcaccaaaaatcagttttttaattgagaaatattgcctttcactaactcttcagtcattatcattgtatttcttggcatctacatctgggaaaacctttgtaaccacaggtaaaatgtaatatggaaatggtcactctaccttagtttaataaatgtattcaattgttttagtgacagaaaatttactcttgaatagagatgcaaatatttaaattaagtaattaaaacccagaaggcagtgtattaacaaaataatgcagcttgatttttaaaaagttattattattattattttttttattattatactttaagttttagggtacatgtgcacattgtgcaggttagttacatatgtatacatgtgccatgctggtgcgctgcacccactaacttgtcatctagcattaggtatatctcccagtgctatccctccccccttcccccaccccaccacagtccctagagtgtgatattccccttcctgtaaagttatttattcacttatatatccatttatttttaaaaaatcattcagcacctacagagtgacaaactttgtgctgagaactcagtccatttaacaatcttattgcaatctctagcatgtaatagctcaatttctatactgtaggtttacctgccccataccagatttatccataaaatgattaataaattagtggctcttagagggacattgtagagaggcagaatttgaagtctttcttttctctgcttttgtgcttcattttacccctctttcaaaaacatttaatgccatcatgtggatcaactttgcacacccccagacctgttccaccatccaaaatcctcattcttttcaatcttctccttctacctccaacaccattttctccttccctaagctttgaatggtaatggttggttggtaagtgatcttgtattgtaacatcctcttgtatttgcatttgaaaagtagatgtgtatagtataaatcttaaagagaaatatgtttaaaaatttttaaaattatttttaattgtggaaaaatatatataacataaattttgccatgttaaccatttacaaatggacacttcagtagtgttaagtacattcctttgttgtgcaaccatcactaccatccatcttgagaactcttttcattttggaaacctgaaactctgtgactactaaacaatagctctctattttcttctccacctaatccctagaaaccagccttcctttctgtctttataagtttgactactctaggtactttgtataactagagtcatacaatttttttttgtgactgccttatttcacttagcgtaatgtcctcaaagttcattcatgtcatagtatgaagcaggctttcagaatttccttcctttataaggctgcatattattcaattgtgtgtacataccctattttgttaaactatttatctatcaatggaaatttgagctgtttctatcttttggctattgtgaataagctgctctcaacaagagtatgcaaacgtctcaatatttggggtatatcccccaattctttcaactttagaagtgatatacccagaagtgcaattgctgaatcacataataattctatttttaattttttaaagaactgccaaactggtttccacagtggctgctgtaccattttacattttcaccaacaggacacaggtgttttgatttctccacatttcatcagcacttcttttactatcattatttttgatatgaatagtagccatcctaatgggcatgaagtagtatgtcattatgatttttatttgcatttccctaataattcgtgatgatgagtatcttttcctgtgcttattggccaattgtatatcttccttggaaaaatgcctattcaactactttgcccattttgaaatggggtgtctgtctttctctctctctctttctctctttctttctttcaagatggtgtttcaccatgttgcccaggctggttttgaactcccgagctaaagcaattcacctacctcggcctccaaagtcctgggattacagatgtgagccaccgcgcctggcctgggttgtcttttttttctgctgagttgtaagagttctttatatattctggatattgatcttttgtcggatatatgatttgatatttttttttccattccatgggttgtttatccactctgtcactccattaattgtgccctttgatgcacagtagtttttaattttgatgtagtcaagtttatctaagttttcttttgcatcctatgcttttggtattatagccaagaaattattgccaattccatgctttctgaaggctgaaaaaaaagaaaaaaagaaaaagaaattattgccaaatctaaatcgcgatgcttttcctgtaagataagagtgcagtttcactcttttgcatgtggatatccagtttttcccaacactgtttgttgaaaagactttcctttcacccttaaacagtcttaggaccctttcctaaaataatttggttgtaaatgtgaaggtttaattttgggctctctattgtattgcattggtctatatgactgtcattatgcaagcaccacacagcttttgctatattactgtagctttgtaatcagctttgaaatcaggaagtgttagaccttccaaacttgttccttttcaagattattttggctatttggggtttcacaagctgccatatgaacttttggatggatttttctattactgcaaaaacactattgggattttgatagggattgaattgaatctgtagattgcttttggtagcatcgacattttaatgatgttaaattctccaatccataaatatcagatgtctttcaacttatttgtgccttatttaatttatttcagcaacatttttgttttcattgtgcaagtctttagcattgttgtttaagtttattcctaagtattttattctttttgatgctattgcaaatggaattattttcttaatttccaaagtgttcattgttagtttatagaaatgcaattgatttttgtgtgctgtttctgtatccttcaagtttgttgaattcatttattagttctaactacaagcatatttaatggtggaatttcaggtgttgtgacagcagattggagaacaggacatttgtctcatgtccctcaggataactcatgtaggctgcaaaacttcaagcatacatagaagcatcaacttcataatgtaatcattttatatctttaatacatcaggcccttcaaaatttagtttaaatgttgagaagtcaaagaatgatgtccttctaagaataaatattctaacacatgatgatgtgctgaacaagatgaagaatttgtatttggatacatatttttaaagcaatgtttagttagtaattgaaaatactaaaccaggagaaaataatgtgcactctggtttccatactagagagatatagaagcagaaagttttacctcagtccacagatctagtaaataaacatccaacacttaaacttgggtcatttgactccaattgatgaattttcagcaaacaatgaaatataaaagtaagccaattcaatatacaactccagaagttataaaattaacagtaaaataaaatggttgagagtagattgaaggaattaaaaataaaagcaagaaattaatggctcaaaggaaaataacaaaatcaatgataaaaccacaacatgatattttgaaaataattacaatactaacatgatccagaaaaaaaaagtgagaagggacaaatgcatgcacaaaaaaaaacaacataattaagttgaatttattttgggaatgtaaagatgatttaatacttgaaaatctattaatataatgcttgaaattaacaaactttaagaaggccaaagatgttctaatgcctggtttggtggattgtttcatttggatctaggatgattcactgtacctgtgcatttgtgcaagctcatttaatttggttggctcttaaaaatattcggattctttctcttaatttgaccccaattatagatatagtgttattgttcttaaatttcttgttgcatttagattatttctatgaagaaaggggaaaatgataaatttattcaatcatatttatgacaaagttttggcttccatattattgtttttgtatttttcttttattgtgaagtgtaccaagttttattttagaaattgctggaccagtaaatattgttcaagttgatgggttgtatagacttcagatttttggaatgttcttgaaaattattcccatttatgtccttaaaccttgcataatcttgtgaaataatgcttcataacaatgactgactgtgcacagattaaacaatgctttaaataatgttagtcattaggaagaattaagctatgatcctgtatgtgagaaattttcatactggttaatttgaacaactatgctttagactcctttatcacaagcaagtttccaggaacagaaagagagtggtcactggccatgaataaagttccagtactctggtggttcacagaagtttaggaactttttcagccttgctaccatgcattgctcatcaggtgtttaataattggtctgaaaggaatgcttatgccactacctggtggtcagctcctaaactgcagtttattcatcctttaaaatatgttttctttcctcttttagtcaaagaatgagacctgaaattatttaattattttaaaaaatttcatttggataaatagagcacctattaacttgctgtcttaaaatatttcaagggcttgggaaaaagtcacgttggtgtcttctaacttctctctgaaatttctctgaaagcaatttatactggaaaaaatagggaacacatgttttgctattaatgagatttatgttcaaaactattaactttgccatgtacttacttgctgaatacttttgtgttttgttacattttttttgtaaagtgtgatagtgatagcttctttagtatttgttgtgagaattcatcaataatgtatcaaagaagattaacaagtagcagatgatctaacaatgagaatattctcaatagacccagaaaaggcatgtgacaaaatccagcatccattcctgattaaaaactctctctaaatgagaaattaaaaggaactttctcaacttaatataggaaacttacaacaacctatgtcaagtgtcatacttggtgaaaaactaaaggcttctccctaagatcacacataagaaaaaagttattgctctcactgtttctgtttaatattgtactagaatgtctatccagtgcaataaggcaagagacagaaacaaaaggcatacagtttggaaaggaagaaataaatcaagctttatttgcagacaacataattgtttaagtagaaaatccaaagaatctgcagaaaatataccagaacaaataagtaagattgtaaaggttgcaggataaatgatcagtttgcaaagattaattgtatttatatattttcacatgcgacaatcagaaattaaaaataaaaacacaataccatttacaatagcatcaaaaatattaaatgcttacagataaatcttacaaagtatagaagacttggtaacttaaagccacaaaacctcatgagagaaattaagacctaaggaatggagagataaactatgttcatagattgatagactcaatattgttaaaaagtcagttctgtttcaattattctacagattcaatataaccacaataaaagttctgtcatttttttggttaaaattagcaggctcattataaaatttactcagaaatataaggcacctagagtagccaaaacagggttggaaaagaaaaaatttggagggataatattatcttacttcaagttgttttccacagtaatcaaaacagtgtggcatttgtatacagatagactaacagattaatagaacagaatagagcccaggaatagacccatatatacatgaacaactactttttgacaaaggtgcaaaggcaattcaatgtggaaaggatagtcttttcaacaaatagtgcttaaataattgaatatccatatacaaaaaaatgaactttgacactctcataccatatacaaaaagttacttaaagtgatcataaacataaatgtaaaaccccaaatcataacacttcaagaagaaaataggaggaaatttttgtgaccttggcctatgcaaacatttcttagatatgatagcaaaacatgacccataaaagacaaaaagttgataaattgaaaaattggttttcattacaacttaaaactgcctctggaaacaattctgtcaacagaattaatagatgagctatagactggaaaaatacttgcaaattgggtatctgagaaagtcatttatttgagttatgcaaagaacccacagaacccattaacaaaaaaaaatagaaaagtaaataaaatgggcaaaagatttgaacaaacacttcagcaaagaaactatatgaatggcaaataggcatatgaaaacatgcttagcatcattagtcattagggatatgcaaattaaaatcacaattaggtactactgcatacctattagagtggggttgacaaggatgtggagcaactgcaactctcaggtactactggtggaaatacaaagtaatataataactttggaaaataattgggcaggttttaaataagtcaaatatacacctgatatcagatgcagccattctactccaagttatttgctctaagagaaatgacagaatacacctatacaaaatcttgaatacacgtttgtagtaactttatttgtaacagcctcaaactgggactaactgaaatgtacatcaacagataaataacaaacacattgttttatatctatataatgtaatagtactactcagcaataaaaagaaataaaccattgtttcaaatgacaccatgaaagaatctcaaaataattatgctaagtgaaagaagataaaccaaaaaaattgtatatgatttaatttgtataaattataaaatacacaaactaatatatagtgacagagaattgcttggaaatgggcatgggagataggaaggttaagagaaaaagtacaaagaaatatgagaaacttttggggtgatgtaaatattcatcatgttgattgccataatagcatcacaagcctatatgtatgtcaaatcttataaaaatgttcactttactttggtgcagttaatttttatgtcaattatacatcaataaaaccatttaaaaatccaatttaaaagtacatgtcttcaacatcacagaagtattctgatatggtccaagatgcaaactgttctcactgggtttaaactatttttcttaagtatggatgacaacagtctacacccatgtgctctactgtttattttcaacccagcatcattccagcttattttgcattcccctttgtatatcagaatagaaatttgtagctgattttccagaattcattttcaacatagttctaggcttgtttctgacaaagtgatttggaaggtggaggagaaggagaagagatttgcaaacccaaacaatatctgggcctgaatttcttaatgaagtctgtatctgagaaactattcatatgctgactctggacgcattctttatctgaatctggggagagtgaactccaggaaacagactgaactaagtgtctgttcttagctatgtgtctaggtataaatgtttacaggtccttgcagaaagttagatccttctcccaaattttactctgataacacttctggaggttttttcttttctttttcattttatttttagatttacatgcggaggtttgtaacaagagtatgctgcgtgatgctgaggtttgggctcctagttggtcacccagatagtgaacatagtacgcaacaggcagtcacctggatagtgaacatggtacccaataggatgtttttcagcccctcccccctccatctctccctccttttggagtccacgatgtctattattcccatctttatgtctgtgtgtgcccacagtctggcttccacttacaatgagaacatatgatattttgttttctgtttctgcactaattctgcacttaagataatggcctctagctgcatacatgtttctgcaaaggatataatttcattcgttttatggctgcatagaattccatggtgtatatgtaccaaattttccatagtctatcacaattgatgggcacctaggttgtttccatgtctttgctattgtaaatagtgctgtgataaatatatgagtgcatgtgtcttttggtagaatgatttatattcctttggatatatagccaggtatgggattgctggcttgaatcataaatgtttttttagttttctgagaaatctccacactgctttccacagggctgaactaatttgcattctcagcaacagtgtataagcattccattttccctgcaaactctccagcatctgttattttttgaattttaataatagctattctgaccggtatgagatggtatctcattgtgattttgatttgcatttctttgatgattagtgatatgaaagattttttcatatgcttgttggccacttgtatgtcttctgctgacgggtgtctgttcaagttctttgtccgttgtttaatggaattatttgtttatttcctgttgatttcttaaagttcactacagattctggatattagtcctatgtaggacgtatagtttgcaaataatttctcccattttgtaagttgtcttttaactatgttgatagtttcttttgctgtgcagaagccttttagattaaataagtcccacttgccaatttttgtttttgttgcaattgcttttgagaacttagccaaaaattctttgcctaggctgatatccagaagtgcgtttcctaggttttcttttaggatttctatgaggtgttacatttaagccttcaatccctcttgaattaatttttgtatatggtgacagataggggtccagttttattcatctgcatatgtctaggcagttatcccagcaccatttgttgaatgagtcctttccccattgcttatttttgttggctttgtcaaagatcagatgatcataagtgtatggctttatttctcggttctctattctgttccatgggtctttgtgtccgtttctggaccattactaaggccaagttttagttacttagccttgtactacaatttgaatttgggtaatgtgatgtctctagttttgttctttctttttgttaaggattgctttggctattcaggctcttttttggttccatatgaattctagaatggtttctactaattctgtgaaaaatgactttgacaatttgataggaatagttttgaatttgtagattgctttgggcagtatggacattttgacgacattgattcttccaatccataagcatggaatgtttttccatttgttcgtgtggtctatgatttctttcagctgtgttttacagttcttctttcacctctttggttagctgtattcctaggtatttgggggcatgtggctattgtaaattggattgcattcttgaactgactctcagtatgatcactattggtttatagaaatgctcctgattttttaatgttgattttgtaccttgaaacttcgctgaagtcattcattagttctggagtcttttggtggagtctttagtgttttctaggtatagaatcatattgtcagtgaagagagataatgtaacttcttctttccctatttggaggccttttacttctttcttttgcctgcttgctctgggtaagacttctagtactatgctgaatgggagtacagagagtaggcattcttgtcttgttcccgttctcaaggtgaacgcttccagcttttgcccattaagtatgatattggctatgggtttgtcatagaccactcttattattttgaggtatattccttcaatacttagtttgttgagggtttttatcgtgaagagttattggattttatggagtgctttttctgtatctattgagatgatcacatgggttttggttttaattctgcttatgtggtgaatcgcatttactgatttgtgtgtgttgaaacaactttggatcccaggaatgaagcctacttgatcccaggaatgaagattagctttttgctgtgctgctggattcaggatgctagtttttgttgagaatttttgtgtctatgtgcatcagggatttgatctttagttttcttttatcattgtgtctttaacagatttttggtatcaggataatactggatttgtagaacaatttagggaagaatctcttcttgattttttggaatagtttcagcatgattggtatcagttctttgtatgtctggtagaagtcggctgtgaatccgtctggtatgtggcttttttattggtacattttttattactgataagctgcacttcactaaaatttaaaagttacgctcttatgaaatgcaatgtcaagaaaatgggagacaaaatgcaaactgagtaatccattgcacttgaacaaatctttcttgatattttagtttctctccatgtaagagacatatttcagctgcatttagtctgccatcttaccaaaaacaggtttttgttttcttttgttatgttataaaatgaaaactcacaggaagtaagcataatgaagtgtttgtttttactgcagacacttcataggaaaagaccagctttaataatctgtgtaatcatggggacatttttttgtgatgacctcagagtgttatctctgatagttgataaccgtcttggtataggacagtgttcacaaataaaatcttgtaaacaactatcaggctggcagcaacaaaaccatcagggaagtttttaaaaaatgaaaccctttgaatcttggaaattgtggtttgaaatgttggaaatcgtgattcctaaagttagtagtcttgtcccaacatctgtaattttaaatgactcacaagttaattcagttctcacacaaccaggttttagaacctcgattatcagccgatgtatctttatcaatttgtaaagcaagagaagaggaaagttctaactcatgcttcagtctgttgatgcaaatctacatgtggattccctacatcatcagaggaaattgattaaactttggcaataaaatgttggcatatgaccacagtagaaagcgtccttgaggccagatctccagattatagggttaacacttgttgcctgattgtcataagcaagcaacttgtcttggagtcattgaaatcgtgagggaataagctattaatctgaggtcatatcttatcagtaaatgtcagtcactgctctacatgttaggatacagtgctgaaaaacatagactcagtaacagcaagacttcttaacattccctctgatttcaactcaaaacccttgtctgacatcccattgaattataccactggcctgcaatggatacgtaaaaatattggcctgtattaaaatatccaagaaaatggaactctcacctacagaaatactctaggatgctttgctaaagatcttttgtttcaggtagtgtccaaagaacaaaattgacaaaatagaccatagagatgacaacatctgcccttcatatttacaaggaccacctgagactggcatgggccttataaatgaggtcagggttgaggacctatttctgacttttggaaggagtccaggaaaacattcatcccagttcagcccctgtccaccagagggagtggcttcctaacacaaactcatttcctgctatcactgtaggtttcactgtgatttcttcatgttaaggatcaagaccattatttgggtaacacactaaagatgaactattctccaggcttagtatctctgatactcttactgcttggttagtgagatgccttttaaaatttggtctctgtcttctatcaagccaaaaaaatctttaaccataatttgacctaagagcattatgctcaaggctaaacagatctctctctctctctttttttttttttccctaggaagaacccgtggagattcagtgacccagatggaagggccagtgactctctcagaagaggccttcctgactataaactgcacgtacacagccacaggatacccttcccttttctggtatgtccaatatcctggagaaggtctacagctcctcctgaaagccacgaaggctgatgacaagggaagcaacaaaggttttgaagccacataccgtaaagaaaccacttctttccacttggagaaaggctcagttcaagtgtcagactcagcggtgtacttctgtgctctgagtgacacagtgacagggactgcagggggagctgagcacaaactctgagcagcacggggggcccggctgctgagtgtcagccactgtgatccactctggttctagcacagtctgtggttgtttgtgcctcagtttctctgattgatgcagtaatcatacacatggccagaggagaaaaacaagaaatgaacatccccaaacccagctcttggttagtgaaattaaaaacagacattgacaccaaatagttcctcatccagtgccaaagtaatttcaaggttaaaccacagaaacaatgaagctgtctctgtgatcatccttgcagacaaagttcaacccccacctcttgttccaggtcactctggtagatattggaggtggatgtgttctattacatttttacagagccaaatatgccagagaaggtggcgtctgtacaatgtctctgtaacagagtacagcaggagagatgacgtgagagccacagctcctcaattcagttcaaatgtctatgcaggattcttaatagagaaagaagggaagagaagaaaggaggagggacagaatgtcacatgtaaaaaaataatacggagaagaaagcaacaattgtcagagagagggaagttttcttttttggtaagccagatggtagacaaaggctgatgttccaaaaagaaagggaaggatcaaaatcattattgaagaaatgactcatttgtaaatcataagtattccttgcttgttacattgatcaattggctttctaacaacaagtccttaagtgagttagttttgcagtgccaatggaagattaagcatacagatttatatttgtatccctgtgaaatcctattaaagacacagtaaagaaattgaaaagggcataaaaccacaaaaagaatagaaaaggaggtgacagcagatggtgataccaatacaattttagaaggcaggagtgtatggagaaatgaaaacttgcatagcagaccagataaagaagaaacctgggcccagtgaaagaagacaacaaggaacaccaatgtgtgttgagcctttgtggaaaggtttagaaatcagaagtaccaatgacctttgaataattggtgaagataatgctttgtgtgtgtgtttctattttgagggtatttgaaaagagggtatgaaaagaggaggagaaagtgagaaaatgtataattaattgaccacccatgctctccaccactgcatgtataacaagcaatgctcacttcccaaacccagaagaaagctggaatttaatatttcatgaattgaagtgcagaacacaataacacaagaaagcagaataaaattaaaatgtaaaaatataatagtcaattatttaatataagaaatataaaatattgtttatgaaatattctcgtagtagtctatgtgtttcaacccaattgtcttctagataagtttcactaatttatactatcagtagtggtgatttggcaggatacctattttccttaaaccttatgtattactaaactttttgacattggcttatgagttagaatttcatttaaagaatatttcatttatttatgaattagatggagcgtcatttaatatacttaaaagctatttacattttttgatatattgccatttatatatctgcccccccttttttttttaccatttattgtctttattttccacatctaccattgttccaactatgagatactggcaaaccctcaccctttgaaaaattctttattttttaagagcagttttagtttacagcaagattgagagaagggtacagagatttgccacacaccctctatcccttcccagatatatatcctctcccattatcaacatccaccaccagagtggtacatttgttacaaatgatgcacttacattgacatgtcatagtcactcaaagttcatagtttacattagggttcacgcttagtgttgcataatatatagatgtggacaaatgtgtaatgccatacatctatcattgtagtatcagacagagtaatttcactgtcctaaaagtcccttgtgctctggtattcattcatttcccaatataacccctggctacctctgatcttttagtgtttccatgattttgccttttccagaatgtcatatacttggcatcatacagtatgtagactttccacactgacttctttcacttagtaacatggatttaaggtttctgtttctttcatgtcttgatagctcatttttttttagtattgaataatattctattttctggatacatcatagtttatttatccattcttcttctgaagggtattttggttgcttcgaagttttggcaattatgaataaagctgccacaaatatccctttggaggtttttgtgtagacgtgttttccactacttggataaataccaatgaggaaaactgctggatcatatggaaagaattttttttttttttaaaagctgccaaactgtgctcaaagtggctgttccattttgcattcccaccaacaatgaatgagagttcttttttgtttatatccttgctagcatttggtgttgtcagaggtctggatgttggccattcaaataggtgtatcatggtatctcattgttgttttaattttcatttccctgatgccatatgatatagaacaacttttcatgtgcttatttgctatttatatattttctttgctgaaatatgtgttaaagtcttttatccatttttttttggtcagactgttttcttattgttgaattttaagatgttttgcataacagttcttgatcagatatgccttttgcaaatattttctcctcgtctgtgttttgtctcccattttcttgacattgcatttcataagagcataactgttaaattttggtgaagtgcagcttatcaataattttttttccagagaacatacctttgtctttgtataagtcgttgccaaacccaaggtcatctagattttctcctacattgccttcttggagttgagttttgttttgcattttacatttacatctatggttgctttttgagttaatttttgtgaatagtataaggtctgtgtctagagtctagattaattttcttttctttttctttttctttttttttttgcctgtgaatgtccagttgttccagcaccatttattgacaaaactgtctttacttcattgtattgcctgtgctcctttgtcaaagattagttaactacatttatgtgcgtctagttctgggttctctattttgttccattgatctatttgtttattcttttgccaatgtcacagtgtcttgattattctagctttacagtaagtcttaaaatcaggtattgtcattcatctgactttattctcctgtaaaacctttttttgttttgataattctgggtcctttgcacctccatataacctttagaatgagtttatcaatattcacaaaaaattgctgggattttaattgagattgcattgaacctacagattaaactgtgaggaatgaacattttgacaatattgagtcttcctactcatgcacatgtcatctgggaacaaagttatacttctttttttcctaatctgtatactttttttttttttacttgtcttgttgcattagctaggactcgcaatatgacgctgaaaaggagtggagagaggcccatctttgccttgttcctgatgttagtaggaaagcatcagtttctcataattatgatgttagctatagattttggaacatattacttatgaagttgaaggaattccactctatttctagttcaccgagagtttttatcatgaatgggtgatgaattttgttaaatgctttttctgcatttattgataaaatcatgtgatttttctagagacttgaaaagttgagaagtttatagccgatagacacagactcattaaaagactgagaacaaattgtgggcctatagaacacttcctctcccctcacaccttaccaccatagcactaacagcctatttacagcggttccttttaccaagtatgtcatgtctggctatcaaataaaaaattacagggcgtattaaaagggaaaatacaattgaaagagacagaaaaatcatcagaaaaacacatcagggttgttggaactatcagacccaggaatttgaaacaaatatgccaacggctctagtaatgaagtagagagcatgccagaacagatgggcaatgtaacagagagaccgaccttctaagaaagaaccaagagaaaaaaaaagctagagatcaaaatacagcaacagaaatgaagaatgtcgttggctgacttattaataaactggacgtagctgaggaaagaatttctgaacttaaggatatatcagcagaaacatccaaaactgaaaaagtagagaaaacaaagactaaaaaacacccaggaaagagtatctaaaaatattcaaaaactgtggaacaactatagaagtatactatacatgtaatgggaatgtcacagggagaagaaagagagaaattaacagaaaacatatttaaaacaatgatggagaatttctcccaaaataatgccagatgccaaaccacagatctaagaagctcagagaacacttggtagcataaatgccaaccccctccaaatcctaagcatatcattttcaaactagaaaatcatagacaaagaaaacatcctgaaagaagctggcaaggggtggagtgggggaagtgccttacctatacaggaacaaacacaagaattacatccaacttctcttcagaaatcatgcaaggaggagaaagtatagtgaaatatttaaggtattaacagaacaaaccaccaacctagaattgtgtacccagagaaattatccctcaaaagtgcaagagaaataaagacattttcagacaaaaattggggatacgtgttgccaactagccctgccttgcaagaaatgttaaaagttctttaaagataaattaaaagttcaggtttcttctatggcagagttgtgtaaatatgaatacattcaaaatataaatgtataaataaagataaacctcaagtaagtctcagttcaactacagaaaaataagaaagtgcttttatgagatatttagctaaaagtgcaattcctgtttgtcttttgcacactagtggagactgtcccataaccagagaacccacttgcaaatttgaaaacctaattagcttccttctcagaaacactctgcttattcttacatttatcagcttctgagaacatgacagcaggtgtaagaagcttctccatcagtaatccaaactcggtgcctgtcattgtaaggaatatgcaactgatgctggagaccagggatttcattcctgcttttgcagggacgaagtgagcttgtgtagaccatgatctctctcctgaatctacgacaagaattctgctactgcttgatgaaaagggggtcactgagaactctggattttttaatgcttatttgattccaatgagggggcaagtaaaggcctgatggttgctctctctgaactcggtaaaacattgtaaaaatagtacatgaaaataaaataatacaattttattattgtcttgtaagtgtgcagaaaatgatactctgtcttagttttcccttagtcgtatcaaagtcttgaaaatttagcctttaccaaagcatttccttttccatctaggcataacacttctgctctaaactcatataaactattagaacattcctcaattaccacaaaaaatccttcaatttcctagtaattagtcacagaagaaagctattatgataaaaacagatggtatttgttctagcatataagtgaataatttatgtttcatgagagtagaagtcaagcatcaaatgatcaaagctgaatagaatttttagcagtaggtttttcgtatcctcctctccaaatttcatcctctcctttcttgaaggggttgacaaagacaaagtgtggcctgcctgtgttctctctcagctcagtcactttcacgtctttgaaaccaaataatgccatggggctgagtccttctcagctgaatccatgaaaaatagttcatcttttcacaaactggtaaacaagtgaagcatttcaattcacacattgggaatgtcaccatttaccatgtgatttgttgattagggaacaaaaaggagaggtggtgaagtgagcagttaagagtaagaatttaggagcctgtttgcctgggtttgaatctgatcttgaatgcttataactgtaaaatcttggctaagttgcttaactttctgactaccatttgttgtggggattaaatgaatatatatatttgaaattctggcccatgataagtgctcagtaattgttagctgattataaaagctgctataaaatcttctataatattgagaaactaagaagtcacttgtgttcagggagagaaaaattaccatttcggtagttaattatttagtaaataagcaagaaaagaagaatacatgttgacctaaaataataatgaagcccttatatgtacaatgtgctgtatcaggacatttgtctactgatagcagtataaattattgcttttacctggaaagaacttatcagaaaaaatttattccataaattgaggaacaagataaaatacataaaaacttaaccaattgttaaaattataagtatgtggacaattaagttttaaaggtattttcaggaggagatcactgtgttacagaaaagtcaaggagaggcatcatggggaaatagaaaatttaatcaggctttaaaggacagacacacatcaaatttgttcattatacaattatttcttaaataggcaacaggggtttttgtaggtttgatgaatagaataataaacaaaatagacaaagtcagacaccagaagagcttacctcatgaggctcgagtctagctttgtctacagtgttcaactttctcttacagaaatatcctatgaagttttcgttctaacatagatattgctcttgcttaccataataattggcctgttttatgtgatgattaaaaggtaaggtttttttgttttgtttttggaaacaggtatcactacgttgccaaggctggtcacaaactcctgggctcaagcgatccacctgtctcagccaactgagtagctgggactataggcccacactaccacacctggccaaggtctaagtatttaagtgctgtatctgtcacttactaaattatgtggccatggacaagtacttaatttagagcatctacacatcatcaattttaataacatacaacttaccacatgattgtaaagattgaattaaattaaatgaatttaattacatgattgaatttagtcaaaaataatttttcagctgatgatagttattctggaatgtggatgaaatgttgataaaacagaacataagataaaataactaaaaaatttaagtatagattaaggtttagctttccactctcctgctattgattatattattttactatggttaaggctgagtcaccctttatttcatattgaccttattccatccaattatttgaactgactgtaatggctttcttgtttggtttctttagttcacaggttttatgcacagaatgaaacattcttgcccctggtgtaacttaatgtaaattctaagatgaattcacatgagccttatggagcaggtgtcagatataatactattatattgagctatggtgccaataattagatccgtatctgggggctcatttaacaggtttctgcattgaaaggagagaaaataacctttctaggctttccttggggaggaatgctttttggatattcaatttatgacttgtacatacatggtagatgctcaggaaggattatagaagaaaaaaaggaaggacaacaatctggcagacaaacaagcatcactctccaacaaatcagcacctggtcctaccaaggtccttttccatgttacctcttcagacatcaggaggagctgtgttatctgtgcatgggggaatggatcttgtttgtggttggctgggaggactctcagcttcctgtaataacagaactatgaatattcactcagagaaacaagctattggcttggtagtgtttgagggctcccagaccccaaccagagtccgcagtaagtctcatggataaagtggagaagcccttgggagtttgtggagaagcccttgggagttttgttcttgattttctcttggcagctgtgctgtgagttttggggctctggaaatatcattgaaaagagcagtttgtagtatcttctttaaaagtctgcacttggacacaggaaggggagcataacacaccggggcctgttgtggggtggggggacggggtagggatagcattaggagatatacctaatgtaaatgactagttaatgggtgcagacaccaacatggcgcatgtatacgtatgtaacaaacctgcgcgttgtgcacatgtaccctagaacgtaaagtataataaaaataaataaataaataaataaataaataaataaaataaaagtctggaagttatagaagggtggttagggcctctgtgctcacctgtggggacttgaaaggagagtatatcttccaaaagtagtcagccatgaatgaatgtcctctgtctgtggttctctgtttaaacaggggtgaacagcctccatattctggagtagagtccttcattcattcctgagtatccgggagggaatgcacaacattcttaattgcacttatgaggagagaacgttctcttaacttctactggttctggcagggtctggaaaaggacttgtgtctttgaccttaattcaatcaagccagatggaggagggagacaaacattttaaagaagcgcttggaaaagagaagttttatagtgttttgaatatgctggtctctcatcctggagattcaggcacctacttctgtgctttgaggcacagggtccccaagcacctgcagcctgtaccacaacctgcatccgggacccttgacacagccttgccttgcaggtgggagtgaaggtgttgtctttatatgtagagagaacttctttataaactctgtctccaaacagaagcgaagggtagtgcagaatctttcttatgtgatgaagctgaatttatattaaattaaattgcattttgttattattgaaatttcattcttcaatgtagattgtgctgtgctggttctgggcctgtttgcccaccgatcccttccacagctctgtcctttactctaaagtcgcagaccactgtggcacaggctctgaggccaagaggcaagttttctccgtgctatactctcaccaacagtattttacccatttgcttgtaaattcatgatgtttcttgtatttgtatcatctatactattatttacttaattaaatgttaaattaacttttatgttgagtagacttcaaaactgtgtaaaatattgttcttattttaatggatactatcagtgaaattatattttatataaactatacatctgatgtgcaggctatgtttgttcctgatacaaactaaaataacattacatgtataacaattaaaaagaccatctgtgtactgcctaacatgacctcctatgttaaccacaatttagaaaatactgattcagctcatgtccctcatttaatagatgaaaaaagtagaatcaacagggacagcatcacttactcaaagcatgaattacagcaaaatggaagctaggaatggaacacagacattgtggccccttgtcacttgctttttccatgaaggatgtaaagtaggattcagtgtttgaaaaaaggagtggtatgttgtaattttaaactaaattatacttttattacttaattatatgttcattagaataaattaggagatataaacacccagaaaacatagaacactcctataatttcataacctagaaatgatagctattcacatgcaataaaatttttggtgcacatgtaaagctatatttttgtataaatgtggtttataatacatcaagtatttattagcacacttttctttcaactttatatttaggtattttcaactcaggaagcaaatattgaagaataattttaaattattgcctagtttccattacataaatatgcttttttaaaaactcttttttttggtattgtttctacttatacagtattacagataatgtttttattaacatcattaaaggtgtagttttaatggaagtgaagttgctggaataaagaaaaacacatgatactgaatcccttatttccatggagctatttctcaccaaactgtaatttcaacagtagcacatgatgatgctaattttccaatattttaccaattgtaaacattattattttagattagcttccattttgttaagtaaaatattgttttttattattcttttcttttaatttgtgattttatacctttgattattaaaataaataaataaaatgagatgagaaaacatcagatgccatcacacagaacaggtatcctttcatacagtaacatgtgttttttgaaagtgtgaaaaatactgctttggtccaagctaccttctaactggtctctcttttctcaaggcaatcaattctctatgtccttgctacttgaagtgtgagccagcattgtctgaacttgtactgattctcaggctctaccctaggctgattgaatttgaatctgcattttatcaagatttccaggcgattctatcacatcaaagtttaagaagcacccatctgatgagttgccagaatgattttttaaagtataaataaagagctttctccacttgtcaaacgtgcttcaatggctttctactgctcctggaataaagtgtggtggctttcaggctgtgatataaaaggatctatataattggaacctcccttggccctttggctttaaattctcttttcctggctctctgtgcagcaaaacttctgattctctttcccacatgtaggctctctttcatccatctgaaatgctctttccctaaatcttgttgagcctgactcaacaagagtcatccttcaggtctcagctcaaatgttactactgtagaagaaaaacctactgacctctgctactcttcctgactaatatatctgtctgtaatcctccccctaactctgtcagaacactctagttatttctcctatgttatttatcgtaacttacagttacatttttggtttatttgccagtatgttcattggccataccttctattagaatgcaatctttatgatatcaggggtattgttggtttagttcatggcttgattctttttgtttgtttttctttttttttttccaatttttattttaggttctgagggtacatgaaaaggtttgttatattggtaaattgcatgtcacagggacttggtggagagattattccatcacccaggtaatgagcatagtacttgataggtagtttttggatcttcaccctcttcctactctccacctccaagtaggccccagtgtctgttggttccttctttgtcttcatgtataatcaacgtttagctcccacttataagtgagaacatgcagtgtttcattttctgttcctgtattaatttgcttaggataatgccctttaactgtatcgatgttggtgcataggacatgatttcattcatttttatggctgcatagcattccatggtatatatgtaccacatttttttccagtacaccactgatacgcatctagattgtttccatatctttgctattgtgaatagtgctgcaatgaacatgtgtgtgcgagtgtctttatggtagaatgatttatatttctttgagtatatacccagtaataggattgatatgtctgatagtatttgttttatgttatttgataaatctccaaatggctttccacagtggctgaactaagttacattctcaccagtggtataaaagcattcccttttctccccaaccttgccagcatctgttattttttttactttttagtaatagcctttctgattggtatgagatggtatctcattgtggttttgatttgcatttatctaatgattaatgatgttgagcattttttatatgcttggtggttgtattgatgtcttcttttgagaagtatctgttcatgtcgttttcccattttgtctgttcatgttgtttgttttttgcttgttaatttgcttaagtttcttatagattctggatattacacctttgtctgatacatagtttgcaaatattttctcacattctgtaggttgcctgtttactctgttgatagtttcctttgctgtgtaaaagttctttagtgtaattaggtcgcatttgtcaatgtttgggtctttttgcaattgcttttggagtctttgtcatgaaatctttgcaaggcctccagaatataatttcataagttttcatctagggtttttatagttttaagttttacatttaaatctttatttagtccatcttgaatttatttttgtatatggtaaaacaaagagatccagtttcagtcttctgcatatggctagacagttacaccagtaccatttattgaataaggagtcctttactcattggttgtctttgttggctgtgtcgaagatcaggtgatcataggtgtgtggctttgtttatcggttctctattctgttccattggtttatgtgtcgatttttggattattaccaaggctaagttttggttacttagctttgtactagaatttcaagttgggtaatgtgatgtctccagttttgttccttcttttgttaaggattgctttggctgttcaggctcttttcttggttccatttgaattttagaatggtttctactaattcggtgagaaatgacaatgataatttgataggaatagtgttgaatctgtagattgctccgggctgtatggacattttgatgacactgattcttccaatctatgagcatgaaatgtgtttccatttgtttttgtggtctatgatttctttcagctgtgttttgtaattcctattttaggtatctttcacctccctggttagctgtattcctagataactttttttgtgtggctatagcgaacaggattgtattcttgattttgctctcagtttggaggttttcagtttatagaaatgctacttattcttgtacgttgattttatatcctaaaactttgctgaagttgtttattaggagccttttagcagaggccatgggttttctaggtaaaaagtcatatagtctgtgaggatagagattttgacttcctctcttcctatttggatgccatttatttctttctcttgcttgaatgttctggctaggatatccagtactatgttgaataggagtggtgagagtgagcatctttgtcatgtttttgttctcaaagggaatgcttccagcttttgcttgctcactataatattggctgtggatttgtcatagacggctcttattattttgagttatgtttcctcaatgcctactttgttgaggagttttaacctgaaaggattttgaatttcatcaaatgttttttatgtctattgaggtgataatgtagttttttttttttagttcagttcatgtaatgaatcacatttattgatttgtatatttaaacaaccttgcatttcagaaataaagactacttgattgtgctggattagctgcaggatttggtttggtagtattttgattaggatttttgcatgtgtattcatcagggatattggcctaaagttttcttcttttgttgtgtctcttctaggctttggtatcagaataatgctggcctcatagaatgaggtaaggaggagctcctattcctcaatattttggaatagtttcaaaaagtaccagctcttctttatatgtctggtagattttggctatgaatctttctagtccagggcttttttcttgttgtaggtttttattactaactcaatttcagaactccttattggtcagttcagaatattgatttcttcctgagtcaatcttgggaggttgtatttttccaggaatttatccatttcttctaggttttctggtttatctgcatagaggtgttcaaaatagtctctgagggttttttgtactgctcctgtgacatttctgattgtatttatttggatcttctctgtttttttctttattagtctagctatcagtctagcaatcatttttattctctcaaataaaaaccatttggttttattcatcttttgtatggtttttcatctccatttcattcagttcagctctaagtttgttatgtctcttcttctgccagctttggggtgggtttactcttgggtttttttagttactctagatgtgatgttaggttggtaatttgggatctttctaactttttgatgtggatgtttagcactatgaactttcttttcaacactattttagctgtgtctcagtgattctgttatgttgtatcttttttttcattagtttcaatgaatcccttgctttttccttagtttcactgtttactgaaaagtcattgaagagcaggttgtttaatttccacataattgtatggccttgagagatcctcttggtattgatttctatttttattgcagtatagtccaagagagtggttgatataatttggagtttttttgaattttttgagaattgctttatagtcaagcatgtggttgattttagagtgcagataagaagagtgtgtattctgaggttgttgggtggagtgtcctatagatgtctgttaggtccatttggtcatgtgtcgagtttacaacccaaatatctttgttatgtttctgcttcaataatctgtctaacactgtcagtggggagtttaagtctaccagtattattgcatggttatctaggtctcttcataggtctctaagaatttgctttatgaatctgggtgctccagtgttggatacatacttatttaagatagttaggtcatcttgttaaattgaacacttatcattattcattatttaatgcccttccttgtgctttttcatcattgtatttagaaagtctgttctaactgaaattagaaaaagtaacctctgctctttttggttttctatttactttgcagatttttcactgtctctttactttgagcctatgtgtgtcactgcttgtgaaatgggtctctaggagacagcatacagttgggtcttgcctctttatccaaattgctaccctctgccttttaaagtgggtcatttactctgttcatgtttaagtttaatatttatatgtgtggatttgaccctgtcttcgagttgttagctggttgttatgtagacctgattgtgcagtttcaccaggtgtggtgggtgatgcctgtaattccaacactttggcaggacaaggtgggcaaattgcatgagcccagtagtttgagaccagcctgggtaatatggcaaaaccctgtctctacaaaaaaataaaaaaatttagctgagtgtgatgctgtgtgcttatagtcccagcaggctgaggcaggaagattgattgagcctgaccagtcaatgctgcagtgagccatgattgtaccactgcactccagcctgggtgacagaatgagaccctgactcaagaagaaagaaagaaagaaggagagaaggagagaaacagagaaagaaagaaagaaggagagaaggagagaaacagagaaagaaagaaagaaggaagaaagaaagaaagatagatagatggtggagctgttttacagtgtcaatggtctgtcttaattgtgtttttgtggtggcttgtagcagtcttttttccccatgtttaagcattcctttagggacctcttataaggcaggcctggaggttacaaatttatttagcatttgcttgtctgaaaagaattttgtatttcctttgctgataaagcttagtgtggttggctatgaaattcttgtttggaatttattttctttaaggatgctgaatataagcccttaatctcctctggtttatgaggtttctactgaaaagttcactgttatcttgatggggtttccttagtagatgaccagccccttccctctagtggcctttaatattttttctttcccgttaaccttggagaatctaatgacgatgtgtcttggagatggttgtcttgtacaatgtcttgctggggctccctgagtatcctgaatttgaatgttgaccttcctagtgaggttgggaaaatttttatgggcaatattctcaaatatgtttcccaagttcctttctctttctctctctctttcagggatgccagtgaattataaatttggtgtctttacataatcccatatttttcagaaatttttgttcattattttttattcttttttctttatttttgtctgactgagttgattccaagaactattctttgacctctgagattctttcctcagcttgttgtattctcctgttaatacttaacaattgtattataaagttcttgtaatgagtttttcagctctatcagaacagtttggttctttcttaaaatggctattttgtctttcagatctcatattattttatttctttacattgtttagattccttggattgggtttcaattttcttatgaatctcaatgttcttacatccaaattgtgactgctctgtgtgtcatttcagccatttcagcctggttaacaaccattgcctgggagctagtgtggttgtttggaagtaagaagacactctagcttcttgaggtgccaaagttgtcgtgttggttatttatcatctgtgtaggctgatgatcctttaatatttgaagttcttgtcctttgaattttttttttacttttatattattttatgcccttgagggatttgactgtggaataagttgcgttcagtcaactggcttcatttctggatgatttcaggggtcccgggttcagatgagcattcctgcactgcatgctctaaccctatggggttgggaccaggcccacttctttgttctctggcccctttaggttaagtaccgactgaactggaggggctgaggtgttactggtttgctgacatcaacactccacttgggggtgctggcaaaagcacttcattgaacttgtggcagcaggatcagggctcatgtacacctgtgccaggggcaatggcgggagggtgtggatatgtgtcagcagtggcctgtctgcagaagctctctgatggttaggcagagtttgctggtgaagtagctatgacaccagtcaccaggaagtgccctggttggacacctaacgcagagttgcaagtaggcatggtcaggtagggaccctgggagaggtcggcagacaagggggtgctcagatcagactagtcctgacccatgggcaagacacctctactctgtccaggtctgacagtcaacaaaggctagagccacgtagaggagcatggtgcaccttggggaataggcatccctactgggctcactgcctctattcccatgctaaacactctgggcttcacacaggctagagtcctgtcactgccagcactccaagtagctctccctgccagctcaaatttctatgggcatcatggggtctcctgcagttaggattcgagaggtccatgggaggagttagcaaatgctcacctatctaattcagcctttcctctggagacattgagcgtcatgaatgagtcccagtgcttggcagccctgtgcagggttcccgggttcctctcactttggtccagggtctgagtcttgtctccatccattctcaatgcattctttctgacgataccctcagagaatgcaagtcttcctgatggtctgatctcttggtaggagaagctctttctagctgtgtctaattgacgatcttggagctcctcttcctggctttattcttagtgtctagaataatgactagcccatagtaatcggtcaaaaattctactgagtgaatgaagaatgaaatttgtttggccctcccctctttctcccttttcccttcctctcattcccactctagcaactttgacctttgtgtatgttgtctctacttcactatgtggggcagctcaattttctctggccctcacccccagactcagaacccagtctttttgtacttagtggcttctgtcaaatagattcactcagggcctcaacctttcctcacttaattgacctcaccttatcagatgtgatgtgaaggactgagtcaactcttaaggctagtaacccatagcgaaatatctaaaagaaaaacgacatacttaaaagatgtttggaaagtataaaagtaacttctcaagcctaataattatgagcacatatcaaagttttatttcaaattactgcaagagaaaaagctcctcaagaaacaaattcaaataattagccttggtatattgttacaggaatccagatttttaaaaatctggttaaagatcattattgcattcaaatgacggttgcataattaccctgcttttgactgcctgtgtagtgactattaggcttctcacaagattaatggtcatttgagtttgtaacactaatttcccagaaggaatctttatttcattaaaggatattagaaaattgctcaagcgttttattagaagtgatggttaattaccacatggggctatgtatattatatcctccgaaaaatgcctgcttcataccagtttggagaaacttacctttctcagctatgtatgttatatccttcataaaaggcctgtttcataccagtttggagaaacttacctttctcatgtgtaatttaaatctttactttacaaatctttacaactcctttagtgaggatttgtcaggtcttggattttgtcccttcttacaagctaataagcttgtttcattgaggctgtcaataaaaacacagggctccttagtaagagacaaaggatttttattacttatggcacaacaaacagcatgaacactgatatatttccatcagtttctccttcctttaagtcctcaaaagatgatgtaatgggtagtaagggatgctacccatgaagtggtattatgtcacaggtgaggaactctgagcttaggaagttcattgcttttataacaagcactcagccagcttgctctttgtctcagagggagacattacctcatctcccaaggttgcttgctggcataactctgagaagtgatccaggtagaatgctcatgtcattacactgttggcacactcatcaagtcacgtttgagtacaagagactcatggtggactgcctttcaataatatccactccatggtcttacactgggttagttgctagaaatttattttatgagtatgccactttgtcagtcattctgatttgtgtaactgagagatgtcatgactaaatgcattacatttgtctcaagtagcatttaattaaggctactatcagcagaactctaagaagcagaatgagaccaacatgcagtattaaccttaattatgcttgatccagccaaatgtgagtaagttccaaagtacagacagctagcatgtagtattttatctattataacccatacatgaaagttcagactgaaatgttggtctttctttgaattaccacaaagaaaaaaccctaccattcccaatatagagatgttatatggcccctttcccccgggcataacccaaaatgcacaagttaatcaaatttgggatttattattaaacttgatttggataagcattgcatcactttggttaaactacgtgagcagtgtcagtgagtatttgcaatatttgcaacctctgtagccattcatgacataacccaactgtcaagatatcaggggaagcatatacatttgtgtcagtcaatttgagacaaggttgtgctgattcttgtgtttgtatacttatgaagatggggaatctatattggaaagctgccactgataaaatagtctgggagccacattcacaagagttttcctgttttcttgggatgtgggaggagataacaaaccaatagcaggacacagagttgctgcttggctccagaagacaatatgtttgtttttctatacttgttctagcatacaaagagagcattagaccctcacttctccccactggccagggtctaagagtttctcttgctatgtgctcatcatcactaatcatcagagagatatccatcaaaaccacagtgagatatcatctcacaccagtcagaatggctattattaaaaaattataaaacaacagatactgttgagactgcagagaaaagggaacacttatatgctattgatgggaatgtaaattagttcagtgcctgtggatagcagtttggagataccccaaagaacataaaacgaagctatcattttacccagcattcccattgttggatatatatgcaaaggaaaatagattgttgtaccaaaaggatacatggcttcttattattattgccatggtattcacaatagcaaatatgtggaataaaactctgtgcccattgatggtggattggataaagaaaatgtggtacatatataccatggaatactatgttgccacagaaaagaatgaaataatttctttgcagcaacatgaatggatctggaggccattatactaagtgaattaatgcagaaatgttaaaccaaatatcacatgttcttacttataagtgggagccaaacacagaacctacgtaaacatggcaacaactatggattaccaaagggagcaggaactggggggtgcattaaatagtacctatcgagtactatgctcaccacctgggtgtaatatacacatgtaacaaacctgcacatgtacctcttgtacctaaaatataaactaaaatatttaaaaatagactcaaaattagcaccattttcagaagcgtttattttaagataaattgcttttaaatgaaatcttgttttgcaatactctgaggttcacaagacatatctagaaaatgtactattgcggaaggtgaagacggtgtaaaaccagtgggggagaggtcagtggtttttcttattggttgattatcagaacactgtcctttggggatatgaaagagttttatatattctttagacataattagacaaacaatggtccatagggcaggtttgatgctgtacaaagtctgtcattttgctagcactgatatggttcttgggtccaccacagcattagatctgttgatgcatttatattatgctttgttacaaatcttgaaaagaggggtgcttcttacagactttgcttcagatattagattttgttttagtaaattttccaagactgtagtggctgccagcttgtgttactttcacttttcctctggtttttgtatttaccgagaaatggtcatggtttctgtcaagtgcaatgtacccttggagaaaggaatttcaatattagcatctattccctcattctatttcctaggtagttgttggtgggaatgggaaaggttagcctcagccatctttggtgaataccgattacatggctcttgagtggaaaaaagcctgcttcattgttggcctcttcaaggacatgaaacacgttgtggaacagaagagaacagtagttgtctgtccttgtttatctatagactcaattgagtttcttgcatagatagctccctgatagatttggtttgctggttatgtcaggatgaacaaaacctataacttttagagattgattcctaggtatcagctttatacaagaaaggcaataagagggacaggacaaatgaacaggcacattgggttttattgacagtctaggtactaaaggcaggttcatctcaattgcaccaacccaagcaagagctgttttggcacagatgcatcattggtgcaaaatggaatgacaaagtccaagctcctccagttcctggccttgttaaaaaatattgcttaggctatgggctgcaaccatgtttgttttgttcagctagattttaggccatttcatcttggaagacttattttgagttataagaaatttctttaaaagttgtatataacagagtagtataggaatatgtggcctgacattaagaagagctatacagtgtgaaattctccctgaattgcaagaatctcactcagatttctataatagaatctgttatgtctgattttttagttcaggaaagtggctattagaaataagtggtcttactgacccaagagttgccatttgatggaaactcatacacacatatatacccctctgcctttctcacacatacattgactttgacttttaatatagcttaaaagctttattaaaagtttttatttttaattgattcataatatttgtacatatttatgtggtccatgtgatattttgttaggtgcatagaatatacaataatcaaggcagggtgtttagaatatctattaccaagagcacttatcatttctgtattgagaatatttcaagtcctcacttctagctattttgaaagtacaatgtgttgttgttaactttagtcattctactctgctattgaaaattagaacttattccttctgtttctacccactaaccaacctccttttattcccccaaccacatccatttccttcccagtctctgataaccatcattctagtctctgtctccctgagatcaactctttttttttagcttccacctatgagtgaattcatgcaatatttatcttcttgtgcctggcttatttcatttaacataatgacttccagttccatccatgttgctgcaaaggacacgatttcatttatttttatacctgaatagtattccattgtgtaactatacaacattttctttatccattcaccagtagatagacactttgttgatttaatatctttactattgagaatagtgctacaataaacatgaggaggcaggtatgccttcaaaacacttctttcctttggataaatactcagtagttggattgctggattgtatggtagttctattactacatttttgagaaatttccctactgttttccagagtggctgtactaatttacattcctaccaacaatgtttgagagttccattttctatgaatcctcatcacatctattattttctatatttttaataatagcgattctaactgggataggatgatatctcattgtggttttgattcgcatttccttgatgattagtgatgttgagcatgttttaaatacctattggctatttgtcttcttttgagaaatgtcaatttagatcttctgcccatttttaaatgggattgtttgacttttttttttgctgttgagttgtttgagttccttgtatattctgaatttaactaaagtgtcatattttcacttttagcagttcacataacacaggtctgtagttggaatacatctttgatcactttcatgagtcctcaagatggcagtgtcttctcagggaccttgaggcaagctctcatgtgctcctgcggtggggaggggaggggatgcatgtgcacttgcaagtgcacacacacacatgaataagagcaagacagagggagagatgagggaggagcttaatgatggagcagaggtgttaaaaagaacatcctttttctaattggtaggacagatttcttttatgattcctacagcagaaaaatgagaaacgtttgttattatttttttttcgtgtttaaggtttgaatcctcagtgaaccagggcagaaaagaatgatgaaatccttgagagttttactggtgatcctgtggcttcagttaagctgtgagttttgggcatctctgtagaaacataatgtatattgtttgcaattattgtgtattctaggcctgtgggtagaaacatgagtggttttttctctaacaaagggagactggggagagtggggggcccatgaaaagatgatttaaattctgggtacgaagtgtcccctacccaatctgtcttctctgtctgactgctgtcttttttcacaggggtttggagccaacagaaggaggtggagcaggatcctggaccactcagtgttccagagggagccattgtttctctcaactgcacttacagcaacagtgcttttcaatacttcatgtggtacagacagtattccagaaaaggccctgagttgctgatgtacacatactccagtggtaacaaagaagatggaaggtttacagcacaggtcgataaatccagcaagtatatctccttgttcatcagagactcacagcccagtgattcagccacctacctctgtgcaatgagcgcacagtgctccccagacacttgcagtctgtacccaaacctgctgggccccaggaatgcctgatgtagagcttagactgcaaggcaatgaagttctatttgttctctagatgcaaatgaaaactaaaagcagtagtattgaaggtttgattaatttgggacatattttcataattctgaaaattattgagaccccaaaggaaaataaaagacaccatttggtctacttgaaatattttctagtcttctctttccactttagttttgaaattttttttttgctgactttgtggctcatgtctgtaatctcaacacttttggaggcatagggaagaggatcacttaaacccaagaatttgagactagcctgggcaacacagggagaccttgtctcaaaaaaagaaaaaaaatcgccaagagtggtgacatgcacctgtagtcccagcaacttgggagggaagaggtgggaggatttcttgagtcggagaggtggaggctgcaatgagctgtgatcacaggactgcactccagcctggacaatggagtgataccctgtctcaaaaaacaagcaaaaacaaaacacaaaacaacaacaaaacacaaataaaatatttttattgaggtgttattgacacacaaaaaggtgcacatattcactttatacagacaatataatcgtgccataaacatatgtaccatttctaaaaatttgcttcctccctggtttctttttattaagttattattgctatacaaaaaggtacatttatttaatccatgcccagtctacttttatgccacatctttactttatgagattggttttatgattctttttatcaaagacaagaaaatatttccatacaataacagatatgctctcatggttcctaagacattttgctctttccccaaggcatttgatagacattgctttaagaatgaaacagcaaagcagaaatgcaaagagaagaaaaatcataagcagactaatttgaaaatccggtaagtcataaattttttaagttacagaaccctaactccatctccagcctcaactacaacatcactcctgagttatataagggtacacctgatggacagctggaagaactagagtgagagagtgagaactggttgagaaaaagcctaattagttgcacaaactaaagattagagagggtctatgttgccattttggggtaaagttttaatcaaattcaaaactcccagcttgagcctgatgggatagttttttgattcctatgtacttgagtgtggcctggagatgggaaggagcattggctgtagttgtagagtgcctcatctccccagcagggcatgacagcacagaaggacttaaaatttttttgagaagggtctctaagtatcttaaagagatccagacaccaaggtcctttgttatgatgagtaaagacctgtatgaataagataccaaagaccgtatggaattgagaatgcttcaggaaatgtttgtctggagagttggaaacactaaacatcatatgaatatctccatcccctgactacaaggcaccacagatttgccctgcagtgtatgtcaagtatggggaaagcatttgtggcctgacgaaataaggccttttagtagacattactttgaattacaggcaaaatatttgagaatcatatttactgtaaaaatgaagttgtggtctgataggcataacattatttatgtagcccagaaggtgggaaaagcttggaaatgaagaataaatgtttctgtccagttttattgacagtcactgatgaaaatgatgaagccaagtcagaatttgctgcaacttcttactctgcagaagtgaagactctgaacaaatatttcccagtcatagaagaaagatttaaaaagcaaggaggaagagcaaacagttgtgctggaatcaaggtacttaaatttttattccacttttatgatttgccttctggcatcatggcactctggaaagaactcaggctgtggtgctggtttgaacatcgattatattacttatggcctttttcatattaagctctacaattatatatatttcaggactggtttcaggattccgtgagacaaaatattgtcttgggatgagttccttaaaagcagagactgcatttggaattctctgtctgtaatttatttgggaaaccaggttgagatgggggaaaggctggacatgagggggaaaggttgagatgctggacatggtccagcagaggtcttgatccagcctgacctcatggggagctctggagcttgaactgtatcacagggttgattcctcccaccctgaggcaaggaggccagactgctcggacctattgtgggtaagaataaagtcatcattggttgtggtgtttcttggggtagaggtatatgctactggacaatggtgactctcattggctaaggtcaattttctagggaaagaggcaactgtgagccaagagtagccaacattcacagtagctggggatggctacactgtcctaggaaaggggatctagcttggggaccagcagtgctcattattaacatggaacttgcctggtatgtgggtagcatttgagaaataatagactttgagcagaataaatgatatcagagattgaagatcaacttactgaaataaggtgtgaagacaagattagagaaaaaagaatgaaaaggaacgaacaatgtctccaagatatatgggactctgtgaaaagaccaaacctacgtttgattggtgtacctgaaagtgacaggaagaacagaaccaagttggaaaacacacttcaggatattattcaggagaacgtccccaacttagcaagacaggccaatattcaaatttaggaaatacagagaacaccattaagacactcctcaagaagagcaaccccaagacacataatcgtcaggttctccaagattgaaatgaaggaaaaaatgttaagggcagtgaaacagaaaggtcaggtaacctacaaagggaagcccatcagactaacagcggatctctctgcagataccctacaagccagaagatagtgagggccaatattcgacattcataaagaaaagaatttttgacacagaatttcacatccagccaaactacgcttcataagtgagggagaaataaaatcctttacacagaagtaaatgctgagggattttgtctccaccaggcctgccttgcaagagcttctggaggaagcactaaatacggaaaggaaaaactggtaccaaccactgcaaaaacacaccaaaatataaagaccaatgacactatgaagaaactgcatcaactaatgtgcaaaataaccacctagcatcatgatgacaggatcaaattcacacataacaatattaaccttaagtgtaaatgggctaaatgccccaagtaagagtcacagactggcaaattggatagagtcaagacccatcggtgtgctgtattcagcagacccatctcatgtgcaaagacacacataggctcaaaataaagggatgaaggaatatttaccaaacaaatggaaatattttttaaaaagcaggggttgcaatcctagtttctgataaaacagactttaaaccaacaaagatcaaaaaagacaaagaagggcattacataatggtaaagggatcaatgcaacaagaagagcgaagtatcctaaatatatatgcaaccaatacaggagtacccagattcataaagcaagttcttagagacctacaaagagacttagactcccacacaataatagtggcagactttaacaccccactgtcaatattagacagaccaagaagacagaaaattaacaagtatattagggacttgaactcagctctagaccaagtggacctaatagacatttacagaactctccaccccacatcaacattcttctcagcaccacatagcatgtattctaaaatcaaccacataatgggaagtaaaccactcctcagcaagtgcaaaagaacagaaatcataacaaacagtctttcaggccacagtgcaatcaaattagaactcaggattaagaaactcactcaaaaccacacaactacatggaaattgaacaacctgctcctgaatgactactgggtaaataacaaaattaaggcaaaaataaataagttctttgaaactaatgagaacaaggagacaatataccagaatctctgggacacagctaaaacagtggtgagagggaaatttatagcagtaaatgcccacatcaggaagtgggaaagatctaaaatcgacactctaacatcgcaattaaaataactagagaagcaagagcaaacaaattcaaaagctagcagaagacaagaaataactaagatcagagcagaaatgaagtagatagggacccaaaaaacccttcaaaaaatcaatgaatccaggagctgtttttttttgtaaagatcaacaaaataggtggatgactagccagactaataaagaagaaaagagagaagaatcaaatagacataacatgaaatgataaaggggatatcaccactgatcccacagaaatacaaactaccatcagagaatactatgaacacttctacacacaaaacaataggaaatctagaagaaatggataaatgtgtggacacatataccctccgaagactaaaccaggaagaagtagaccaataacacattctgaaattgaggcagtaattaatagcctactaaccaaaaaaagcctatgaccacatggattcacagccaaattctaccagaggtacaaagaagagctggtaccattccttctgaaagtattccaaacaatagaaaaagagggaatactcccaaactcattttatgaggccagcatcattctgatatcaaaacctgacagagacacaacaaaaaaagaaattttcaggccaatatccctgatgaacatccatgcaaacatcttcaataaaatattggcaaactgaatccaacggcccatcaaaaagcttatccactacgatcaagttggctttatccctgggatgcaaggctggttcaacatacacaaatcaataaacgtaatccatcacataaacagaaccaatgacaaaaaccacatgattatctcaatagatgcagaaaagacctttgataaaattcaacatcccttcatgctaaaaactctcaataagctaggtattaatggaacatatctcaaaataataagagctatttatagcaaacccatagccaatatcatactgaatgggtgaaacctggaagcattccctttgaaaaccggcacaagacaaggatggcctctcttaccactcctattcaatatagtattggaagttctggccagagcaatcaggaaagagaaagaaatagagagtattcaaataggaagagaggaagtcaaattgtctctatttgcagatgacatgattgtatatttagaaaaccccatagtctcagtcccaaaactccttgagctgataagcaacttcagcaaagtctcaggatacaaaatcaatgtgcaaaaatcacaagcattcctgtatactaacaatagacaagcagagagccaaagcatgagtgaactcccattcacaattgctacaaagggaataaaatatctaggaatacaacttacaagggatgtgaaggatctcttcaaggagaactacaaaccactgctcaaggaaataagagagggcacacacacacaaaaagaaaaaaactccatgttcatggataggaagaatcaatatcattaaaatggccatagtgcccaaagtaatttatagattcaatgctattccatgaagttaccagtgactttctttactgaattagaaaaaactactttaaatttcatacagaaccaaaaaagagcccgtatagtcaagacaatcctaagcaaaatgaatgaagctggaggcatcatgctacttgacttcaaactatgctacaagtctacagtaaccaaaacagcacggtactggtaccaaaacagatatatagaccaatagaacagaacagagacctcagaaagaacaccacacatctacaaccatctggtttttgacaaagctgacaaaaacaagcaatatgaaaaggggaaagaattacctatttaataaatcgtgttgggaaaactagctagccatatgcagaaaacagaaaccggatcccttccttataccttatacaaaaattaactcaagatggattaaagactaaaatgtaaaaccccaaaccataaaacctctagcagaatacttaggcaataccattcaggacataggcattggcaaagtcttcatgactaaaacactaaaagcaattgcaacaaaagccaaaatagacaaatgggatctaataaaactaaaaagcttctgcacagcaaaagaaactatcatcagaatcaacaggcaacctacagaatgggagaaaatttctgcaatctatccatctgtcaaaggtttaatatccagaatctacaaggaacttaaacaaatttacaagaaaaaaaaccaaacaaccccatcaaaaagtgggagaaagatatggacacttctcaaaagaagacatgtatgtgaccaaaaaacatatgaaaaaaagctcgtcatcactggtcattagagaaaggcaaatcaaaaccacagcgagataccatctcatgccagttagaatggcgattattaaaaagccaggaaacaacagacgccggtgaggatgtagagaaataggaacacttttacactgttggtgggagtgtaaattagttcaaccattgtggaagacagtgtggtgattcctcaaggatctagaaccagaaataccatttgatccagcgaacccattactggatatatactcaaaggattataaatcattctactataaagacacatgcacacgtatgtttattgaagcactatttataatagcaatagcctaccgtagtaaatagcaatagcctaccctagtaaagtttaatattttgaatgaaatatattatgttgtcttacatatgaaaagaaaatctacaggcagaatcaaggaataggtcagaagtgcaagggagaactgatttcccactggcatgagtcaacagagtacacagaaaggaaggagtttgttttgacctttgaaaagaattcttgttagccggttcttatttcacctgagtttttttctttatttgattttttcaattttaggatccaatgatctctatgctaaaataagttgggtgaggaagtcttttcattcaagaatttcatcttcttaggccatagagttgactgctctggttcaatgcatcctgtctcccacccacaggggactgcttcttgcctagctctgttgagtatcactgtcaacctatcctaagtcttctatacctcccattttcttggtcatctcatttcttgtctgctggttgcactcctcccagctttactgagttcacgtaggcttacttttctttctgtatctttaattcttcccataattacttatttatatgttatattttattaccttcattattctgctcaaatttctccataaatgggcttctgttgatgttctttttaaggcgagataccataatttggcataatgtatcagtctattctgagcgttgataattcaaatgggacttttctctaagttttttctcctagccttacaaacatcaaacttgatttgaaaccaagaagtctttttcacaatttctgcttcacaaagaaaattattacctattagtttgcattgactaattagctaatgacacgtgatccaggctgattttaagtatgagtctctagtcattttttttttcctttagcacctaataaaagagaaatctcttccatccactctaatgctcatgtgaatccactagcacagtgccacacgaagcttagctaagcctgaggcaattgatcttctcccctctccttgatgagtgcctctaaaaaataacatagagcatcttaatggtattccaaaatctggaatattgccttctgtgactaatttctcagtgaagtaaattacttttctagttttacataactccaatttcttatctattttttgaggggaaaaacatttttattttctaatttttaaattttatttctttcaactgttattttagaatcaggagtacatgtgcaggtttgtaacagaggcatattgcatgatgctgaagtttggactatgaatgcattgtcgctcaggttgtgagcatagttcctaatagttttcagtccttttctccttccctctcttcccactctagtagtacccagtgtctattgtgactatctttatgttcatgtgtagctagtgtttagcccccacctataagtgagaacatgcagtatttagttttctgcttctgcattaattcctttcagataatggcctctagctgcatacttgttgctgcaaaggacaggatttcatttttctatggttgcatagaagtccatggtgtatatgtgccacattttcttcatccaatccaccaccgattggcacctgagttgattccatttctttgctattgtgaataatgctgtgatgaatgtatgggtgaatgtgtctttttggtagaaaattttatttgcctttgggtatatacccagtaatgggattgctgggttgaatgttagctctgttttaagttctttgagaaatctcaaaactaatctccacagtagctggactaatttatatttccaccaacagtatgtaagtgttcccttttctacacagcctagccaacatctattattctttgactttttaaaaaaagccattctgattggtgtgagatggtatctcattgtggttttgatttacatttctctgatgttaagtgatgatgagcattttttcatgtttgttggctgtatgtatgtcttcttttaagaagtctctgttcatgtcctttgcctacattttaatgcggttgctttttgcttgtcgatttgttgaagttacttttgtttctttcttttttggaaagacagggtctcactctgttgcccagactggagtgcagtagcatgatcctagctcactctatccttaaactccagggctcaagggatcctcctgctttagctgggactacaggcacatgccactatggccagctgatgtttttcttttccttccttccttcctcccttccttccttccttccttcttccctccctccctcccttccttcctctctttctctccttctctttctctttccttccttccttctttccttccttccttccttccttccttccttccttccttccttccttccttccttctttcctttcttccttctttccttctttccttctttctctcactttttttttttgagtcagattcttgctatgctgcccgggctggtcttgaacccctggcttcaagcagtcttccagcttcagccacacaaagtgtggggattacaggtatgagccgtcacacccagcttgttacttatagattctggatataagacttttgtcagatacatagtttgcaaataatttcacccattctgtaggttgtctgtttactatattgatagtttattttcctgtgcacaaactacgtaggtcacacttttcaagttttgttttggttgcaattgctttccaggacttaaccataaattctttgccaatgccgatggcaaaagggtatttttctgtttttttccccctaagatttttatagttttgggtattacaattaagtctttaatccatctggaattaatttttgtgtatagtgatgggttggggtccagcttcattcacatacactggtatgtggctagccagttatccccagcaccatttattgactagagagtttttcccaatttcttatttttgttgactttgtcaaagatcagatggttgtaggtgtgttactttatttcagaatttgctattctgttccattggtttatgtgcccatttttataccagtactatgctgttttggttactgtagacttgtagtgtagcttgaagttgggtagtgtgatgcctccggctttgtgcttgttgcttagattgctttcactatttaggctcttttggttccatatgaattttagaatagttttttcctaattctgtgaaaaatggcattagtagtttgataggaatagcgttgaatctgtaaattgctttgagtagtatggacattttaaagatatggattctcctaatccagggtatgcaatgtttttccttttttgtgtgccatctctgatttctctcagcagtgttttgtagttctctttgtagagatctttcacatccttggttagctgtattcctaggtatctattctttttgtgtctattgcaaatgtaattttgttctttagtctttaggaccctgctcaaggtcctgcagcattgccactgctgagccatgctcctgctgctcggcccagcactccagtgtcccagctgtcagcttgaacagacagctcgaacattattggtgtatagcaatgctactgatttttgcaaatttgttttgcatcctgaaacttcactgaaatcttttatcaagtctaggagcctttcggcagaaccttgagggtttttctagatatcaaatcatactgtcagcaaagacggataatttgactgcttctttccctgtttgggtacactttatttttttctctttcttgagtgctctggctaggacttccaatactatactgaataggagtactgagagtatacattattttcttgttccagttctcaaggggaatggttccagctttttcccattgagtatgatgttggctgtttgtcataggtggctcttattattttgtggtatattccttccatgcttagtttgttgagggtttttatcataaagtgatgttggactttattgaaagctgactgcatctattgacatgatcatatggttttgcttttaattctgtttctgtggtgaatcacatttattgattcgtctatgttgaacaaaccttgcaccccaggaatgaagcctacttgaccttgaattaactttttgatgtactgctggattcagtttgctagtatttttgttgaggatttttacgtttaagtttgtcagggatattgactgatattttcttttttcattgtgtctctgctggattttactatcagaatgatgcagactacattgagtgagttaggaaggaacccttctcctcaatgttttgggaatagcttcagtaggattggtaccagttcttctttgtacaactggctgaattctgttgtgaatccatccagtccaggggttatttttggttggcaggttttaaaaaattattattactaactcatttccagaactcattattagtctgttcaggttttcaatttcttcttggttgaatatatagaggttattttcttccaggaatttattcgttttctccaggttttctaatttttatgaatagtggtgttcctagtattctcttagggtcttttgtatttctatgggatcaattgtaatgtctcctttgtcatttctgattgtgcttatttggaacttctctcttattttcttcattaacctacttagtggtgtatcaatcttgtttattcttcctgaaagacaacttttggttttattgatcctctgtatggattttcaagtctcaattttgttcagttcttttctgattttgtttatttattttcttctgctagcttttggctttgtttgttcttctttttctagtccttctaattgtgatgctagaatgctcacttgagatctttctaatttcttgatataagtatttagcagtataaactttcctattaacacctttagctgcaaaccaaagactctggaattttgtctttctgttttcattaatttttgctctactttgttgtttacccaaaagtcattgaggagcaagttgtttaatttccgtgtaactgtgtggttttgagagatctccttggtaatgatttccatttttattacactgtggtccaagattatgcttggtatgattttggtatttttgaatttattgcaatttgctttatggcttcaatttctcaataattttgagattaatatcatgtactatacagaaggtaacatcatcacagattcaggaggaaagaaacgctttctgttgaagttttgatatcatgtctgaaatgagaaggaaacagcttgctcccttggatccgtggttcctcctgttgcctctagagggcgatgttgcatcaagtaggcatctgttttcatcgcagaccatcctcatccattgagcctcctccctgtagctggctgatgtagctcgttgatgtctgtgtggatagggagctgtgacgagagcaagaggtcagaacacatccaggctccttaagggaaagcctctttctgtttctgaaacttttcaaagccagggacttgtccaatccaacctcctcacagttcctagctcctgaggctcagcgcccttggcttctgtccgcccagcttaaggtcctgcagcattgccactgctcagccatgctcctgctgctcgtcccagcgttccaggtgatttttaccctgggtgagtaacattccattctttttccttccacagaagtgactgtgttgtaactgaatctaaattgagacacattttttactcaaacagcattgatgttgcaggaggaaccagagcccagtctgtgacccagcttgacagccaagtccctgtctttgaagaagcccctgtggagctgaggtgcaactactcatcgtctgtttcagtgtatctcttctggtatgtgcaataccccaaccaaggactccagcttctcctgaagtatttatcaggatccaccctggttgaaagcatcaacggttttgaggctgaatttaacaagagtcaaacttccttccacttgaggaaaccctcagtccatataagcgacacggctgagtacttctgtgctgtgagtgacacagtgcctgagactgcaggagagctgaacacaaacctcctgagatgctgagactttctgtgactcaagaactcaacctgtggagctttcaagagggtcccttttttctgtgcccgttttgaaggcacatagggcagggtgggctgagcccttggtagggtttgtctccggaataattgctccaatgtcaatgtcatgccacattcagatatgctttgtcccacatggaggtttcctgatgaatttcttcagtggggacctcctccacactctgaagaaagcacatcataaggtgtcagaactccgaaataaaaggcaacaacatttttatacaaaattatttctagcaaccattatgattagtattgcctcaggtgttaacttgtgaataaccgatgtaattgattagaatgttagctaaaagctgtgcaggatggattctcaattagggtaacccatacagcacagattctcaatcagtgtgctgtagattctcaacctagatttgaagcttaacttctagcacatacataatatcccactgtgtggtattgacatatttaaagtaaattagacataatatcaagatttttaatcttgtgagcattatgcaaaacaggaaattaaacataaatcttaatacaatattgaaaaactaagctgtcaagttgtgatcttttttaaaacagctattccagtgatttccaagttacaaacttgagggataaaaatgtaaccaatataaagatatcaaataccctagattcaactactttaaaaactactttaaaactccgaggcattttattttaagagattacacagatttattatataaaattacacaacaaaaaattccagttgcattatcagagagtatatgaattctaatgggcatatccaagaccagggtaccctattacttactctgaaataattatatcgaaaaaccaacatgttaagatattttatgtacatgattattactccaaatttttatttgtagtttgatcacatggtagaattaaaaaatgcctctcaaagtattataaaatgttcacacatacagaagttgtcttccttaattcaacattttgtaatttttgatgacaaaaattatgaaatgaatcatctcacttcttaaaaatatttacaattgcctaaatctcctcttttaaaatgagatgaagttgtattcttcccttattataaaacatgtgtttaaagtagtttaaaaatattcctatgaattgagctaaaagagggtagagggtttataataaaaaatatttagacttggcttcttctcttgcaccaaagactcaggttcttgcttatggtttctttggctgctgacattctttagttacttcttagcgtgccacctcttccagttttactttcgtcctcatttcattttcgtttgtagtttttcttacagatttgtcttttcattgtgccttttatggcctgttattttgattatgttcagattttacaggccaagaacacttaacatgatgtctattttaacaaatttttgaagtgtacaactcagttaactattggcccaatgttgaatagcagatctctagtaattcttcatcttatctgatagaaactttgtaccccttcatcaacacctccccacttcttcttcccccagccccaagaatggtaaccaccattctactctctacttctattagtttgacagttttagatatctcatgcaggccttctatgactggcttatttcacttagcataatgtccttagggttcatccatgtttttgcatgtggcagaatctccttttttaaaggttgaagaatattccattttatgcatatatcacattttcttcattcatccatcagtagatatttaggttgttcccatatcttggctaatgtgaataatgcggcagtgaccatgggagagaaaatgtttcttcaatatcctgaatttaatttttttgataaataaccagtagtgggattgctgaatcatatggtacatttttaattccagggggaaactccttactgtttttcataattgctgcaccattttgcagcaagggttccaacttctccacattcttatcaacattgttgttgttgttttataatagccaacctaaaaggtgagaggtaataactcattgcgatatctaatttatctggtgattaatgatgttgagcagattttcatataacttcagccatttgtatgtcttctctggagaaatatctactcaaatcctttgccaatgttttaatcaagttattaaaacattgatagttataggagttccctatatattttgaagattagccccttatcagacatatagtttgcaaatatttctttcactctacatgttggctttttttcctattgattattttctttgatgggcagaatcttttaaattttataaagtcctgcttatctacgtttggttttgttgccagtgcctgtggtgtcacatacaagaattggctgttgcttagaccacatgtcatggagagtttcccatatatttttccaatagttttacagttttgggttttacgtttttaattaatattgagttgatttatgtgtattatgttagctagaagtccaatttcattcttttgcaagtggatattcagtttccacagcacaatttgttgaagaactactctttccccattatgtatccttgatgcccttgtcaaacatcagctgagtgcgtatgtgtgggtctatttttcagctctctattctgttccattggttcgtatgtttgtctttatgatagaactatgatgttttaattactgtagctttgtaatatattctgaaaccaagaagtggggtgcttttagctttgtttttctttctcaggattgtttgagctattctgggccttttgtgtttccagagaaattttagaattaaaattttagttttttctatttccataaaaatttcattgggattttgatagggatagcattgtagattgctttgggttgtataaacaccttaacaatattaaatcttccaattcatgaacatagactatctttcatttatttgtgccttctttaatttttcttatgaatgttttgttgttttctgtgtacaagcctttagactaattagttaagtttacttctaaacattttaatcttttgtagctataataaatggattgttttctggattttttttcagatagtttattgttaatgtgtagaaatggcactgatgggcctggtgtggtggcttatgcctgtaatcccagcactttgggaggccaaggcaggcgaatcacgagatcaggagttcgagaccagcctggccaacatggtgaaaccctgtctctactaaaatgtaaaaaattagctgggcatggtggcaggaacctataatcccagctactcggggggctgaggcaggagaatcacttaaactcgggaagcggaggttgcagtgagccgagattgcgccactgctttccagcccaggcgacagtgtgagactctgtctcaaaaaaaaaaaaaaaagaaacggcactaatttttgtgtgttgatttttataccctacaactttactggattcatttattatttctaataggcttttttggtggcgtcttcagggtttttaatgaatttatgtcatctacgaacagaaataattttacttcttttctgatttgagtacttttaatttctttttcctgtctatttactctggctaggatttctagtattatcctgaatggaagtggtgagggtggttacccttatcttgttctgatcttagaggaaaagcttttttgtgtttcacacaccactgagtgtgatgttagctgtgggctttttatatatggcctttattatgttgggggtaatttcccaatttgttgaatatttttatcataaaatgtgaagcaggttcactgtgtactggttaccaagttgtctgagtccagtgagacagaatacacatgcatacaacaaggtacatgaaacaggtttattgattacagataagcaagggacaacagaagcttaggtttcattgcaaacaggtcccccagggctcaggaaagctgtctagggtggatagggtgtcatctgcatgtggcccagttgtaccacacctgagggaccccagaaattagcatgccctaggttttagacccctgggtaatatgataccctgggccaaaaagtactgaaggacactgtttctagggggtatctgaaatacagccagcctgttccagccatttcattcctgtctgaagatgttacattcccagtacattctatagttattcttatttatttatttatttatttttgagacagagtctcgctctgtcgtccaggctggagtgcagtggcgcgatctcggctcactgcaagctccgcctcccgggttcacaccattctcctgcctcagcctccccagtagctgggactacaggcgcccgccaccacacccggctaattttttttgtattttctagtggagacgggacttcaccgtgttagccaggatggtctggatctcctgacctcgtgatccacccgcctcggcctcccaaagtgctggaattacaggcatgagccaccgcgcccagcccattctacagttattcttgagaaccacaaacaagaaagtggagagaactgggttggtccaagaccacccagagaaccatcctgcatgaaaggatgttgaatgttgtcagattctttttctgcatctattgagatgatcatgtaatttttatccctcattgtgttatgtagtgtgtcacattcattcatttttatatgttaaaacatccttgcatcccagggataacttccacttggttattgtatgtgatcctattagtgagctattgaatttggtttgctagtatttcactgaggatttttgcatctatgttcatcgggaatattggtctgtataccttcttgtagtgtctttgtctggctttgatatcagggtaataatggcttcataaaataagtttagaggtattcccctttgaattttttggaagaatttaagaaggattagagttaattcttctttaaatggttgatagaactcactaatgaagctgtcaggtcttttgtcttctttgttaggaggttttggattactgaatcaatttccttaccagttataaatctgtttagatttttttatttcttcatgattcagtcttggtaggttatatgtttgtataaatttatgcatttcttctaggttttccaatttgttggtgtataattgtttgtaatagtctcttaagattcttcttatttctgtggcatccattgtaatgtcttctcttacatttttggtttatttgaatcttctctcttctttttcagtctaattaaaagattgtcaatttagcttatgttttcaaaacttagttttgcttatttttatgttattttctactctatgttttatttatttctgctctaatatttattatttccttctttctactaaatttggacttcacttgttctttttttctagttctttgagatgtaaagttatgttttttgtttgagatcttccttttgaattcaggtatttatttctataaacttccctattagtacagcttttgctcactctataaattttgatatgttgtgtttttgtgtttgtatctcaaaacattttctaatgtgccttttgatttctttgaccaatttgttgctcaagaatatgatgtttaatttccatatattttggaattttctagttttgcatctgctatttatttctagtgttattccattctcattagaaaaaatacgtggtatgatttcactttcttaaatttgttgagacttgttttgcggctgggcatggtggctcccacctgtaatctcagcactttaggaggctgaggtgggaatgcttgaggccaagagtttgagaccagtctgggtaacagtgagactccttctacacaaaaaatagaaatattgacctagtggggtagtgtgcagatacctgtagtctcagctactcaggaggctgagatgggatgatcacttgagtccaggagtttgaggctgcagtgagtcatgatgctgtcattgcactccagcttggacaacacagtgacatcctgcctcaaaaaatgaaacaacgaaaactgccctctttgttttcagtgaccctatgcatcgggaatacactgggtcctatcagtgctccttgacaggtgtgatggaagccagtctctcaggcagcctgtggcaaagctagaatgttggatgtaatgtccaagtctttccctccccagggagaggctgaaactggggctttcctcttatttatgggacacagtacagggggtaggaaaatgtcagaaaccctcctgtcatctttgatgtggttggttgcttgctcattcaaggtactggagactctgaactagttactggatttttcacaagtgaattgatttatttattgctattgaattggtgtgtccatcggggaaaagagggtccagggatttcttttttgccatctttctgatgttacacctttcacggacagaattcttcctgttctcatgggcttctttatttgcccttcaccagaactgacctcctcttgggcatctagttgaatgtggttttcactgtgggcatggtggtcctgcctgagtgccagcaggccaccctgcaatgagagctccatcatacactttaaactttccttgatatttcttttagctgtgcctcttaagcagtagaaggctggatatgaaaaccattcagataatttctatatcttaatagaaaaatttagccttttaaacttatatatgcatgcatttatggctacaactaatatttttgagttatcttacatggcatagtgacatttgacattgtagaacacttccttcctggaatgctttctttattggtttttagaaatcccactcttttttccctctgcttcagtattgtcagttgttccttctcagtcttttttgctgttttttccccacatttaactaatctttaaacattggcaagccttagaaatttatccttgaaaatctttttcctctataaatactttattcacagctggttttattcagtctcttggctttaaatcccatttaaatatccaaacttataactgaatcccagataactcatctggattctggatttgagtatcaaataatctatttgacatcttctttttgacatcctccacttaatatatctgaaaatagtctactgaatttgacctctatactcactaagccttccttacatcccactcgcttcttgtgaacatttcttcattttggtaaaagacaactccatttaccaaatcttctaatccccttagccaaaaactttgaaatcatcattgtcttatcacttttctcacatccccacttgatccactaggaattcctatcagccatttcttcaaaatatccccataatcaaccagttctcatgacctttactgctaccactctgatccaagccacagtaatctcttgcctagttgattgaaagaaacctaactgaacttctttcttttgccattgttcctcttctgtctgttctccatgcagcaggagaagcaatctctttaaaacataattcagataatttcatttctgtgctcacaactatgaaatgtcttaccatctcactcaaaggaaaaccaaatgctttactataatatacaagtccatttagctccctgccatatctttgacatttgacatcagctaccaccttcctacttactcccactctccagcctcaatgcacttattgttgctctaacataccaattattttcctgcctcaaggtctttgcagctgctcatttctctgccttgtgtactagtactccaggtaaccacatggcttatttctacactttattccaccaaatagccatgcacaaaatatttactgcagattatttttgtaatagtgaaaattaaaacacaagatgtttctcagagaatggctacagaaactgtaataaatctttactatggaatattaggaagcaaacatgttaacatcaataggttatcaggacatataattgggtaccaaacacattgcaaactgctgtgtgcttgaaagttatagtcagacaaaaatttaaactgtataaatattgagtatgtattcatccacgtgttctgcaataattttaaattaataataaaaaaataggctccaatttctttctacatctttgtagaaataggctccaactccaatttctttctacatctttgtccatttgctcttctttcattttcatttagtaagggcctctattcaactcacaagcttatttagcttcttgattgcattctgttttatcttttctaggaacagacaacaatgatcatattcttaaatctttgtctaaccatcctttgttttaagaaatggctccttatttctgggttcattttgtactttttgaggtgttacttgatatatatgaaaacacacacatgtgcatgtttgtctttcccactaaactgcaatgtcttgtgagtagagaaaatgtcttactaattttttaatttcgtaagacctagcacaagatctagcttacagtagacctcaataaattactaaagacttactttgaaataaattggagaaatcacattaaaccttgaggaagcaatttgataaaatattttaatatggtaatctcttgtacatggaatttggaggaagaaaccagtttcctttttttaaaaaaaaaaaatcaccataagcctgacagtttttttgctcttgacaatctgggtggttcctcaggaaagaattgggatgaaggctctgggactccacagatgagttagtgggcctgatggtttcagaccactaggaggctctctaggctttactctaaatgaggaaattttccctcaagttctgagatagctgactcagcgaaaaactgagagttagcatcagttagcaaagcatctgaactagtcatatatgaaacggacagggggagtctccatttattcatctgcaaagatgttctgtggctgtgatgggtgtcacagagacggtctcccaagaagactgatcttagaaatcaacaagggaaatgataaagctggaagccttacagctttaatttttatgactaaaacttctaaaatatgagtctccattctgactttgaaattatttcaataatttccaccttcttttatacctcctttgaaactagaaaaacaagaaaaaggaaatgagaagaaatgagaaaaaaataatgaaaatattcagagagaggataaaagagagtaaaagaaataagaggttgggggaaaaaaagatgacacatttaactgaatttcaaaatgtggtctatgcctcatatagtttctgtgttgcaaggttaaaaagttctagagatctgatgcacgacaatgtgaagatacttaccactactgaattgtacatgttaaaatagtcaagatggtaaatttaatgttatgtgtttttttaccacaataaaaaatgtgacctctacctcttgttcacagagcagaattgaccaggtggggctgcaaagtgaatggagaagtgttggatagaagaagagagatggaaataagctggggtggccatcatatacacgtgctatttctctatcaaccaaagtctcactggagacattttatatgttcatgatgactatatgtcctatgttaacagaattctcttaatttaattgtattgtatttactcctttaagggtgattaaataaacgatgcattcgatgagatattctttctttgtgagagctttcttataaataaaatcacaatcacttttcaaatcacatgtcctgattttttggctaaggaaattgggccactgaccctgataattttttcaggctgtacttgatccagatgaggctcccatttgtctctgagatatcttttccctttcttcactcccctcctgacttgtccgattactgggtactttaagtggaggcaatcctgagagcataaaaacctagacatttctgtgtctctagtcagcagtgcggcactcagcagggtactgacgtcagcaattacgcccgtacactgcaggaaaactagaggaaaatctctttgctccctgatctcattgtattccacctcatttaagtaacagcatatctcttacttttttctcagctatttggaggccagaggagagactttctcaagagaattagttttcttttttagaaaaaaatatatctgccggagacgctatctccatgacccatagttttctgctcttaatcccggagcttctgtctacttgaccccagatttatatctgaccccaaaatgggacacctcacttgagctctctcaacacagcttgactgggagctggagaaaatctttggttaaggaccagggattggggactctttcaatctaccatttttctagaatttccgtctttctgagccaaatgattgttcctttttttatggccttcttttcttttcttttttctttttttttttttaaagtgtatagaactaaaatcccaaagggccatttcctgtgtggggaaggtcagaatcaatgatggtggacggaaaataaaataacttgatctggcaatgtttaaacatttcactaaaatatctgtgtagaaatttaaatttctatgaagtgtaatcgatcaatattttttcttatgttttttgactgttatgcttagaaaatccatcaccattctaaatttattttaaaaattttttattttacttaaaatattaaatgttacgtcctttgaactttatttgataacaggtattaaggtaggcatcctaacttatctgttaacttccaaatgattgttaggattgcacattttcccccattttaactaagtttccaaatgtatttgtatatttgaactttgtattctacttcattaagccctatatgtggattttaaaaataacattctattgcaattagtatagcatcacacttttactgaggaggaaattctcattctctgaatttgaaggcttcctgaagcctgagttagctgcagtattgtatttggcctctagagagagatgttacacaaattgaatttgatagccaaaaacaacctgatctttttgaagaatagcttttggctatacatgccgggtaaactcatccacctctctgtcagagtgtctatgtggctgaatcgtttccagaaaagacctccagaaaatagcttcctgtttctccacaggtcagacatgaagcccaccctcatctcagtgcttgtgataatatttatactcagtaagtaaagcctctttttgttctatttttctatggtattctgatttagaataactttaatgaatattatccccagtctgtaagacttttcctgatccagaattggtgttataggaggaacaagagcccagagagtgactcagcccgagaagctcctctctgtctttaaaggggccccagtggagctgaagtgcaactattcctattctgggagtcctgaactcttctggtatgtccagtactccagacaacgcctccagttactcttgagacacatctctagagagagcatcaaaggcttcactgctgaccttaacaaaggcgagacatctttccacctgaagaaaccatttgctcaagaggaagactcagccatgtattactgtgctctaagtggcacagtagctggttttgcaaggaagcagaacacaaaccctttaaatacaggaaatatttctttgcaaactctctgtatggccacagcagggcattctttctccagaaattaatattgagtttatctcgtagatattatatcatcagtcatcagttagctatagattaacctcataattttgtccaaaaaattctcattatttaccctgcttaaattaaatttaaaaatagtaaatgtatttattttgtctagtagtactggaaacatactttcgaaataaaaactatattgcactgcataaaaagtattcttttctttgttcagaggtactgtccaggcttccatggtgcagtcctacctcttcaactcctctgctgccccacgtgatccccacatgtggttgtcaccacatacctgagcatagttcctcaaagtgctctgctgtttcatggcttatgattgttcatctttctatatctattacccttctttccatgagtttcatagactcctcctatctcaattggtgtccagccaggaaaaaagaagcccagtgaagtttaatataaagatttattaaataataataagtaattaactactaatgggtaaaaaaacctctaaggaatataggaatgcacatgtaagcagaagttcctgtctctaggactaaggtagaatcccaggaaaggaacagattggcataagcatgacccctcctgccaaggctatgattcagatctcattgagagtgtgtagctggagcttgctgcatagtggagtagtttgctgaggtgccagagaaaaatactgacaagcagaaaaatacctaccaggattacaacacaattcatgggaagcccgcaaacgagtgctgctgaacttgcttgtggtggctgtgaaacttgccaagaaaccacctgtcgggcttgctggaggggagtgccactggtgtcctacaggccaacgaagcatagtggacaagaagtgtggaaaacataccagaaccaggaagagaagcgtcatccttctgcggggtccttccagccccctctactgacaaagcttaatatcaaatatttagagggtccagatccagttcacaaatagggtaattagggtggatttggagctgagaggtaatacattgataactgtcacaccctatcccttgggctactgatctttcatatgcattcctttttttctttcttctttctttttttgagacggagtctcattctgtcacccaggctggagtgcagtggcgcaatctccgctcactgcaatctctacctcccaggttcaagtgatttttctgcctcagcctctcgagtagctaggactacaggtgcctgccaccatgcctggctaatttttatatttttagtggagacggagtttcaccattttggccaggctggccttgaactcctgacctcaggtgatccacccgcttcagcctcccgaagtgctggtattacaggcatgagccactgcacctggtccatatgcattcctatatgcacatttcaacttccaaacaatagtgaaatgacactatgttgctacctaataagctgaagctgtccttgaacaagtggagttttcattctttctcccaaatgagatgatccatagtcccaacaaccactgtatgaatccctgactgtatcagccacatctcaagttcagaggaagttctactgaatatgctgttatatacagactaaattataaagctaatctccaataatttacatataaaataattatgataagaaagagagaataaaatggcagcatatacaaagaaacacttacatataatgagcaaagataaaatacagaaagctaccacattccttgattccagacttggtcctgggcttcaattgacatagacagcttccttctcttgttacgtattttatattcttctgccctcatccacgtcatcggtggattggagttatttacctggtggaatgacaaaaatcttcattctcgaagagtctgagttctcaatagtcatggcttttaatttgttgctgcaggtttcccttaacttttactattgggcacgaaagtgccattaggctcctcaaaaaaatcccccgggttttagatgtagctctctctacatgtgttgtatggcttctggagctactcgcccccttcctaacaactttgcaacatgttctggtaaccatcacggtatattaaaactttatcgtatctcctcttcctgttgagctgaatgttccagagaagggccgttatgttctctctggctttaatctaaccttctaacacagtatggagcacacaatatgtacacagtgaaggaatgttaaataaattcatttaaacaaatagaaaaatcagcaatcctctcctgtgagcatgtgagtcaacctccactaatgtgatttcactggtttcttcagggaaccgtgtcaaaccaattaatacaggcaaacaatatgttcatctgggcaaacagatgcctaatcaggttaagagttttcttaattggaaaaatagcttgcttatgaagacaatagttttatcaataaaactcacctcaagaccttcggcacatcattgtaccaatcctaaactcgtatatcatgaactagagaaaatagctgagaactagagctagatagtgagttcttggacatgcacacaaaaagtgcagtctataaaagaaaaaaacgataaattagccttaaataaaattaaaacctttggcattgtagaaagaccttgttaatagaataaaaggcaacctatagacagagagaaaatgtttataaatcacacatcagacagaagtcttatatctacgatgaataaagagcacgcaaatctcaatgtaaaaaagaaacaaataaataatccaattagaaatagaatagatatttcaccaaagtagaaatatgggtgaaaaataagcaaataaaaagatattcaatatcattcttcactagcaaaatgaaaataaaaatcacaatgagatatcactataaacatattagaacagctaaaatacaaaacagtaataatactaaatgttggtgagtatgtagagaaatggacacttttatacattgctggtgggattgtaaaatagtacagccattctggaaaataatctggcagtttttttataaaactaagcatgcacttatcatatgatcacaccattgtgcattggacatctatcccagtaacattcacataaagtcttatacaacattcatagtagctttattcataattgccaaaaactggaatcaacctagatatttttcaacgggtaaatggttaaataaactatcatagttcataccatggaataatatgaaaaaaaaagaacaaactgttgatacatggaacaacctgtatgggtcaattcccaaaggttacatacagtttgattccatatatataacattctcaaaataacagaactataagagatggttgctaggggacagagattgggcatgggagggtgtttgtgcatatagagggttaggatgagagaattctatgttgatggaacagtctgaatcttgattatgttggtggttatatgagataaaatcaagaaccacacacaagtatgcatgcacacacgtggagaaaagcaagaaaatagtgacaattgaatactacctgtagtctagttagtggtatttgaacaatgtcaatttcctggtatttatattgaatttcagttatatacgatgtcaccactggaagaggctatgtgaagagtacatagggttctataaactattttggcaacttgccatggatttataataatttcaaaacaaatacagtactatagtttcaaaaattgcattctttactctcaccaccaattttatcagtaaaaccgctaagagttgggaaggtgtgaagccgatggtagtggatgcaaattttccaaaattctaattttcacttggaagctcaaatattatcatgggtgacaaccactattagttgttttcctcaaaatggcaggctcacattttatcattttcaagaacataccttccaactacccaaatctgctgttctgtcactcatgccttcaagtaaaaaaaaaaaaaaaaaaaaaaagttctatgagaaacagctagtttagctcacaactcaaacaatactccagtgtctttctctcttgaggcaccaccgtgttagtacaccacagatgaactttatgcatacgtcctatgtcatcacacagaatatttaaacggtgtactctcaagggtcaagatttaatttaaaaaattttgcttctacatctaggacattgttgagtaaaatctttttctcttgccagtgtggtggtaatgattatgtacaatgactactagaatattttgggttcatttattttacctgtgttaaaacatcagcaattgcatttgcttcatcagtgtaaatgtcaacacagtgaaagactcaagtaatatcagcactattataaaaatagttttattctacctcacagttttaactctatctcacagttttcccaagaggtcagcaatatttctggttactttttgcagatacagctaaatacatacaaatattaaaagtactatattcttgacctcctcattgtgagacattagacacatcatttaatttctttgaaccagggtacatcttttaactactattctaaatttgctcacagactgtttcaaaattatctggaagagagcagacagattaaaatttcagtttgttaaataacactggttctttgctcaaaaagctttcatatgtctttatttcgcactgaaaaacataaagatttattttggcagtcatctgacccagacccttcctctagacttatgtcttggaaccctccaatctacatattgctctagccagcaatctcttcttctcatttctttttttcctttctctgttctcctgtcttctcatctttcccatctctctctctgttttacacacaaaataccttaaaatcaatttttgggaacatttataaaatactctagaagattcttgctattctttttgactgctctgcatcaggacccattttcttataacaataataatttttcagtcactaatgaatgtcaggcactgtgctaaatgacattttatgatctcatcgttaaccttcaacagctctgaaaaggtagtattattatttactcatgatccatgttctacagccaagataatgtaggcacagaagacagaaacagctactgaactgatagatgtaaacctgacttcgatggcctgactataaaacttcctctcttcctggacccgcctgcctcctgccatagaaactaaaacttctaggtattcactgctatgggctgaactgtgtttccacaaaatgtggacgtagaagcgctaacccccagtacctcagaacatgactctatttggagacagaacttttaaaggtaaagttaaaaggtggtcttgagggtaaccactaatttaataagactggcatccttaagaggagattgggacagatagcacaggcaaagggatgaccatgtgaagacacaacaagaaggcaaccatttatgagtcatggagaaaggcctcaaaagaaactaaacctgccagcactttgaccttgaaattgtagtccctaaaatcatgagaaaataaatgtttgttgtttaagccatgcagtctgtgatactttgttatgggagccctggtaaactaatacagcctactggttaggcttgatgtgggcacatggcttgggctccaacaattagatgaattgttccctaactttcactcaggagttacttttgcaaaaaaacaaaaacaaaaaacaaacaaaaaatgagtaagagtttcctttttgagagtggtggtaattgcaacaaggtggacatgagagtttacaggctacaaggcagtggaattgtagctgcatacattgtcctgcgtgaacagtcttgcataaactacgggcagtatctggagctcaggaaaggagccagtgggatactcagaggagtgcttctccagagtgattttctgtactgctgctgacttcatagcttttgagttcagttctctgaccctactggagattctgaggtaaatccagtattcattaatttattccttttctacttaatttaggcagagtccatttctgttgcccatcagtaaaaaccttgacttgtatataatctcattccagggaaaattttttaaaaggaagctcgtaggtacatgatcagaggtcatagtaactacagggaatttaacagtgcttctcagaggtagtctgaaaatattgagcaccaactgtctttcgtagttgagttcttacctgaattgaaatgtatctgttcctattctaagttagaattagatttcaataaaggcagagactggaatagctttgtaatttcttctgagtcagctctgaacacacgtcctgatggcagcaggatgatgttacgatcacaagagggcagtgcctccctctcctcagactaacttggctttaaatcagcctatctgcattgaaaggaaaggactgagcttgcctgtgactggctagggaggaacctgagactaggggacagaaagactagggattcacccagtaaagagagctcatctgtgactgaggagccttgctccatttcaggtcttctgtgatttcaataaggaagaagaatggaaactctcctgggagtgtctttggtgattctatggcttcaactggctagtgagttggggattttggtgatgggaatggcaagaccaaattttagagcccacagggctgaggggtgaagtgttcttattaatttggaaatgtaatttgaaaatgtaatgactgactcctggtcccggacctgtgtttctgcctaggggtgaacagtcaacagggagaagaggatcctcaggccttgagcatccaggagggtgaaaatgccaccatgaactgcagttacaaaactagtataaacaatttacagtggtatagacaaaattcaggtagaggccttgtccacctaattttaatacgttcaaatgaaagagagaaacacagtggaagattaagagtcacgcttgacacttccaagaaaagcagttccttgttgatcacggcttcccgggcagcagacactgcttcttacttctgtgctacggacgcacagtgttccccaggaacctgcagcctctacgcaaaccctgccaaagcagcttcttagaagccctaatagtgggtagaattagtggttatgtctttcagtcaagaagagtctacaaacagctggcaaagtaaaaggggaactctttcaaattcgtgattttttaaaaagcatcttggactaggggaaaaggcatgaaatttggaacaggaaatggaaatgccaggctcagttctgctaatcctggctacatagggacattgtcagtgtagcagccttcaatttcctcacttgaaataaaggatatggatcaatgagcccaaaatattacttaatccctaattttattagggaaaaaaatcactgggcacttgtggaagaggaggaaggctgcacagttttagaaggtctcatttgtcctatgtgcagccctcccaagacatcagtgggtctttaaggtgcatgaggtggctcttaggttcctctaattcttgtataagaagcagtagattcattaagcattagaattggaagaggtcctaggactctcaaccaagcttttcattttagagctgaggagtaaaaccattgcataataagacagacaattttctgaatctttggagtgatagtgacaaatatctggatctgatttcaccatttattagttgtatgattcccaagcttcaatgtctctattaggcaaaatgggaatttataagaaagtaacaacttttccccatccaaaggagagataggtgtttgacactaccaggtcctaaaacgctgtgttttgaaagcaggcatttttagtaccaaatacataacagtttttcagctatttattcttgctcctactgagaaataaatactgactatagttttcttgacacagtttagatactactgaaaatgtgtttgtggagaaaattagagcatttgtatttaggttcatgctttggtgagaaaagtgggggagggcagggaaaggttgtgtcagaccttgacccattaatattagctgtaccagaatcactagagtatctttgaagatctggactattaagctcaattctggcttactcaatcagcctctgataaagtgatgaatttcaattgtaatgaatatcttctatatatgtaagagattggctcaggttcacatttaaaaaacccaaacaataatgtttgtaacaagattgacgagtttttttccacataaaggagctctgtaatattcagggctggtgctgtagcttcatcatgttacaaaggaactagggtctttctagcttactgtttttcactcttaatgtgtcactcttttttttacactttcaagagactgatagagatccttccactttatacaccttccagactgaaagaaggagaaagtcaagggcacatgtacatgctggctgagtcagtcttttccagaagctccgcccaatggcttctgcttacactcatttgctagagtggtattcgatgtttccacctcctcctatctgcaagggaggctagaatatcaggattattatctaagtatatttctattcacagcaaaatttgggttctattagtaaaaaaaataggtgatgatggacattttacagacaattagaagtttctgccagaccctcagtttaggacatattaggactcataatatttttggttcatagttatttttgaattaccatatccaatgtattttcaagttctattgagtgtaccacctactaagttttccagaagacattacaacctctataacctaattcacctccacacccaaatttaaaattctccctaatcgcttactcctctgcccccagcaagcttgacagaccccatcacttctcagtatagtgctttgtacacagtgagggtgaccttttcagagtgcaaatttgaccatgtcaaccacctgggtcctcactggttcttagagtagaaaaaaaattgcttcatgtgatttacaaaaccctccatgatttagactcttaatacctctccagtatctttccacaataagctcctaatttatctttttcttcaatactggtcctatctacgtttcttgaatgcactttgtttatcttatataaccccctcaaagcaattttaggatacattcttactctttttaaaaaattattttctcttcccttgagagtagagcccagtaaatgcctacttgttctcatacgtctgttcaagagtcagtaatagaagaaagctcaatacgctttcttagaattgtggaccactgcctttttaaatgggcagtttctccttttatttctttatttaattaataattgtctctattattactctatgtgctccttaagggcagggaccattatctgtgctgctcagccttgaatctgtaacaccaaagtaacttaagcactaagataatcaatttttcctcttctttcttcctattaatttatttaatataatatctttattttaagcctcctctaagagttaaaataatgttgtagtaaaagaacacacaagaggtcgggcgcaatggctcacgcctgtaatcccagcactttgggaggccgaggagggcggatcacgaggtcaggagatcgagaccaccctggctaacattgtgaaaccccgtctctactaaaaataaaaaaaaattggcagggcatggtggcgggcacctgtagtcccagctattcgggaggctgagtcaggagaatggcgtgaacccgggaggcagagcttgcagtgagccgagatcgcgccactgcactccagcctgggtgacagagcgagactccgtctcaaaaaaaaaaaaaaaaaaagaaagaacacacaagacaatagggctgagtttttcaaactatagtccatgggtatttggaattgtatgaataaattgttggtgtataatgggggtcagaaaactatggcctagtgttcaaaacaacctgccacctatttttgtaaagttttattgcaaaatagccatgctcatctatttacacattgcttatgatggcttccatgctataacagcagagtttagtacttgcaacagagagtgtatgatttcaaatatatactatttgtccttttatagagaaaagtttaccaatccctgaggtatagaaattaaatgagaattattagatctgtgtgcttaggacaatgtaaaataatgaaggtacatttctaataatctagatgactaatagaataatccccttgaatttgatttttttgtcacttttaccaaattaagggtaaatgggataataatactctacaaatgaagacattgcagctgtttaaatggtgaaaagtttttggaaaattttggttatgatatagaacatagcacatagcactacagatgtatcacatagtactacagatagggcacactcccaagagcctgcatctttccattgaaagaggatgtgttgcaaaccttcattgtttgtatgcatcaacgtgcaattcaatagacataaaagtagcagtaaataaaaaacatttttttcagtgctgaattcttgggtgtttcattaaataataaaattgtataatggtgactgacatgagtatttctaaataggaaaagtgaagaaaaaatcctagtaatcactaatcacaataactcagacaatagcacatcaagctccaaataactttaatcaaatcagttattcaactgtacacatccatagctttcttttaataagtctacactaaccgttgagtttcagtgaaaaatcatttcttacactaatgttttaatttgaattttatcgattttatattttgtttgaagtttttgtctgatttggtaattgtataaaacctgtgagcctaaaaagttgatacccaattttattgttgggtatatgaaacaccgtaatattaaaaaaaatggttagtatgagagtggctccttataagaagacctgcaccttactcaattttgaagaacacggaatgcacctgctaccaggccctggatctactcctaaatgaagccagtcacaccaggggcctaagacactagacacatcttcccacagactgtccttcatcaaagataattttgcccaccagatacagccattcattcattttttccaccaatttttaggggttttttttgagcatttcctatgagctaaggttctaggaaaagggctgctgatagtaataggattcaacttctgatgcaggagcactaagtgcagcttgagaaacaggacagaaatgattctaatatgatgtgataaggacagaaaatatggtgggaaaaaggagagcactaactcagctcgagagatggcagaatgttttcacatggaggtgatgcactggttttcaaagaatgaacaggagtcatccaagtgaaagggagtggggagaaggaagggcattctaagcagaagtgctcaccccccggttttgggggaccagtgggaaatatgtcgagaaaaaaatctcacattttcttttttttatattctcaggatatcctgagatgcctaaaactaaattaacacttgttgtgaacacattagatgcagggaatggggagattcaagggaatcatattgctctgcgccttgaagaaggcgacaggaatcacccacacgatgaagtcagcagagtgtttgatgctccttccttgagtcccacccttcacctcggacaccgttttctttctgagtctgcaggttaagccgcaccccagggtgaaaatgaacatcattctgagactcagagcaggcgtcagggacagagaggagcctcaagagggcgctgctgccttcagcttgtggtttgacacaaatttcatctttccttccttcgcacgtctctttgttccagcctgtggcctgatcttgtagggcagtttactctgcttaatacgtgagtcaagattttgtagaagattccgccaaagactcaacaacataaagaaatatatatacctttcggtttggatatctctcaacaaaaccttctactgcttctcagccagccatgctgtctgcttcctgctcaggacttgtgatcttgttgatattcagtgagtaatgtttactcaaaacttctgagatgttctattccttagctttaggatgacctttaaccccttccaaactggagaccatgcctcttctattgccactataataaagtctttcccttttttaggaaggaccagtggagactcggttacccagacagaaggcccagttaccctccctgagagggcagctctgacattaaactgcacttatcagtccagctattcaacttttctattctggtatgtccagtatctaaacaaagagcctgagctcctcctgaaaagttcagaaaaccaggagacggacagcagaggttttcaggccagtcctatcaagagtgacagttccttccacctggagaagccctcggtgcagctgtcggactctgccgtgtactactgcgctctgagagacagagtgggagggactgcagcgagagcccagcacaaaccctggggaacgcaggtggggcctgggtgtgagccgctttgggagatgaatgaatatggactcttgttcgctgggaccccaaatggagaaaataatctcatatttctctgcatcaaagagcacaaaacagaaatgtgggcccctcacacatgggatgtagctcaccacgagaaacttttcctaatattctggagttctgtgagccttgtttgtcctttgtctctcctgcatgattctgtgagttttacacataaaaatgcaggttttgcagggcctgatgcttctttgatttctggggctctctttaagaaaaagaaaattaaattataaatttaagtttctaggttatgcggtagaaaggggccttaaaatcaaagccgaatatacttcatagtaaatctgcatttgaggttacatagagatgatcttctttaagactgaaatattataatagtcttagtttgtcctgatactgggaggttccctaactccaagtcctctttcccacggcagcactagaatcactttagctatcattaatatgagtattttcacttctatctttaaagaaataacagctttattgagatataatttgcataccttaaacttcattcttttaagtctacaattcagtggttttagtatattcacagttatccaatcattattgtgatctaattccagaacattttcaccacctcataaggaaactctgtgcctactagcactcacccccattcttttcttaccctagccataaatcaaataaaaatattgatttatgaggaataataacacaaaattttgatgtacccagtcttattgtaaatacaggacctcttatgaacctgtatctagagggatgaaacataagtcccaacatttaagactgcaaagagtttaatgactgtgatgcaggggacaaaagccagtggagattgaactctgctggtattttaacaggatttctcttgtttttggtaatgctttggttacaaattatatatttttgggtgtttcccatcctaatctccaccataattaatatgcatggattggaatagcaaggggattttcaagaacacacatattgagttataacagaaactcctgtctttgagcagtgagtagaatttctggaatttatttttgtttacacacacacacaaaatatgtgtgcaaataaacatgtaggtatttttctctggtgttactcgacatggcaaacactgaacagatttggtgactcaggaggtatgttgtgaaatcatttattaacaataaaactatttctttttttattatagtttaagttttacggtacatgtgcacaacgtgcaggtttgttacatatgtatacatgtgccatgttggtgtgctgcacccattaactcatcacttaacattaggtatacctcctaatgctacccctcccccctcctcccacccacaacaggccctggtgtgtgatgttccccttcctgtgtccatgtgttctcattgttcaattcctgcctatgagttagaacatgcggtgtttggttttttgtccttgtgatagtttgctgagaatgatggtttctagcttcatccatgtccctgcaaaggatatgaactcatcattttttatggctgcatagtattccatggtgtatatgtgccacattttcttaatccagtctaccattgttggacatttgggttggttccaagtgtttgctattgtgaatagtgccgcaataaacatatgtgtgcatatgtcttcatagcagcatgttttataatcctttgggtatatacccagtaatgggatggctgggtcaaatggtatttctagttctagatccctgaggaatcgccacactgacttccacaatggttgaactagtttacagtcccaccaacagtgtaaaagtgttcctatttctccgcatcctctccagcacctgttgtttcctgactttttaatgatcgccattctaactggtgtgagatggtatctcactgtggttttgatttgcatttctctgatggccagtgatgatgagcattttttcatgtcttttggctgcataaatgtcttgttttgagaagtgtctgttcatatactttgcccactttttgatggggttttttgtttttttcttgtaaatttgtttgagttcattgtagattctggatattagccctttgtcagatgagtagattgcaaaaattttctcccattctgtaggttgcctgttcactctgatggtagtttcttttgctgtgcagaagctctttagtttaattagatctcatttgtcaattttgtcttttgttgccattgcttttggtgttttagacatgaagtccttgcccatgcctatgtcctgaatggtattgcctaggttttcttctagggagtttatggttttaggtctaacatgtaagtctttaatccatctggaattaattttcgtataaggtgtaaggaagggatccagtttcagctttctacatatggctatccagttttcccagcaccatttattaaatagggaatcctttccccatttcttgtttttgtcaggtttgtcaaagatcagatagttgtagatgtgtggcattatttctgagggctctgttctgttccattgatctatatctctgttttggtaccagtaccatgctgttttggttactgtagccttgtagtatagtttgaagtcaagtaccatgatgcctccagctttattcttttggcttaggattgacttggcaatgcaggctcttttttggtttcatatgaactttaaagtagttttttccaattctgtgaagaaagtcattggtagcttgatggggatggcattgaatctataaattaccttgggcagtatggccattttcacaatattgattcttcctatccatgagcatggaatgttcttccatttgtttgtatcctctttgatttcattgagcagtggtttgtagttctccttgaagaggtccttcacgtcccttgtaagttgggttcctaggtattttattctctttgaagctgttgtgaatgggagttcgctcacaatttggctctctgtctgttattggtgtataagaatgcttgtgatttttgcacactgattttgtatcctgagactttgctgaaattgcctatcagcttaaggagattttgggctgagacgatggggttttctagatgtacaatcatgtcatctgcaaacagggacaatttgacttgcgtaataagagctatctatgacaaacccacagccagtatcatactgaatgggcaaaaactagaagcattccctttgaaaactggcacaagacagggataccctctctcaccacccctattcaacatagtgttggaagttctggccacggcaatcaggcaggagaaggaaataaaccacgactggcaaagtagtaacaaagattgagactaaaagttttgccttcctgctagaaagtgaaaactccgtatggttagtttgtaccttgattctatctggagaaaaagacatatgtaagaccaaaaggtgcataactgtatcatcccatgtattcactatagctcataataaattgtaagtctcacattttccaccaaagatgaattaactaaccgtgattcaattttaccactgtatatttacagtccagtaagttatattgagacaaaattggtacttaggacagtctagcatcttccatctctacaggaagtatgtgacatgacacagtcaaactcatcatatatctgttaactatacttcctgtaaaaggcagaagcctcacacagcccagtaactttgctagtacctcttgagtgcaaggtggagaattaagatctggatttgagacggagcacggaacatttcactcaggggaagagctatgaacatgctgactgccagcctgttgagggcagtcatagcctccatctgtgttggtaagcgtgaccactagcacaggacttaggctcctgttagttcagaaggatgtggagagaggcagatctttttagtctaatgaggcttagaaagaaggggtaaagggcaatgaaatcagagcactaggtctgaagccacttaatctattttatccccagagttacaaataagggatcagtctattttttcctctttttcacagtatccagcatggctcagaaggtaactcaagcgcagactgaaatttctgtggtggagaaggaggatgtgaccttggactgtgtgtatgaaacccgtgatactacttattacttattctggtacaagcaaccaccaagtggagaattggttttccttattcgtcggaactcttttgatgagcaaaatgaaataagtggtcggtattcttggaacttccagaaatccaccagttccttcaacttcaccatcacagcctcacaagtcgtggactcagcagtatacttctgtgctctgagtgaggccacagtgagatgggtgcctgtgggagccctacaaaaacctcaacaagaggcagggctcctggggagagactctgtcacagacaggaagaagcaaggagggtctgtgtcagcacaggtggtttggcaaggaaacctgagttcaattcatgtacaatgtctagatataacatttattagaagcatgtgtatcttctattctttagaatagattaagacagaatgtatagcacatatttttatatcacatatagaattatgcaacaaaaagtgcaataacaaaatatattaatcttgtgttggttttattgagggtgggaaactatccaattatcttcagaccaaatggatgattccattcataagctgttaagtttttagaatcacttatacatttatgcattaattactatgtagaatgctttaatccaagagtaatagaaatgcctttcatcgatttttcttaagaatggtatcagtactcaatgaggtaaaaaaattaaatttaaacttctttccataatcatgccagcaacctcttgtatatcagaatagatgcgaaatgtttctcaaatttcctttctctggctcctctgtttttgtgacatgattatgatattttaaaagtatctaaatattttgctgtcatttagaggctgcctactaagagagatgtctaaggtggaaatttgtcctaacggattgaatatcttgctttcaccctttcccctttgagttctggccagtttgaagctgagaagtggttagggccagaattacagctgccatggcaaccagaacccacatggtgtgtccagtgtctacttcctgtctaaacacatatttctccttggatgttacaacaggtgctcaggaacaaggatttttatttcttttgctccacacaagtttttagaaacctgagtttttaacattaaaagaaaacagacatcacattaaaaaccagatttctagcttacctataaacatgggaagagctgggaaacactacactccctggggtagaagtcaaaagttctgtttggacacataatggttttgatgtatatgtattttatttttaaaatttatgcaaatttaccattcatttcacagtatgaattaatttaaaagtaaaaatttaaattattagttacaagacaagctaatctgcaagacaaacaaatctgaattaccatttcatgaaactatacctggttttccccccatgatttcatgtatcatgggtgtgtcccagcttgagaaccttaagtatagtttattcttaattcaggagacatttgtagctatagtaagcattggagaaacattagttaataagacagacatggctcctgcctttatggaggtcatgttctagggggctatatccactatagaatggtaggcagagggaactaaagttttacacaaacaacctatgtgaccttaagaaagttataactcccctgaacatgttctctcatttgtaaaatgtagagatttaattaggcagttgctattgaataatattttccaaaattttactagcctcacaagagcacatagtccactgcctttttgagttcctaacacttactagctgcccttcttttttgggaaaggacaattagttgttatagacatattcatactgttccacatgttgcatgataatgtaacagtaataacaagaagccaaaggaagcaggcagagaggagagtggcttgggaggtcatctgctttccatacacagaagctactgttctatgtagccgggcagcagaggaagagggagaggaagaaggcgagagggagggagaggagaaaagaaagaaggatgaggaggagaaggaggaaggggacaggaggaaggcagaatgagggatagagaagagatgaagggaggaagaaagaaggaggaaagcacagaacaggtactaattcgaaagtaaatatgtttatttgaattcgaagtttttgtttctttcacaaggcattagacacactttctttcctcagcatgagagaatgagaaaaattagaagattcctatttgacaagcatgaggtcacactgaacttggactagctggctgaaactccagaggacacagctcctccagttaagctctaaggcaggttgagagacagattttctagtaattctggttgtcccttgtaaaattaatataattcatctgttcctaaaggaactaagaacattgtaactgggaaaggttccttcaatattagagttctctctagagctaagtagcaaatgcaaatgctcataggtgcctagagtagaatgaaatgagtgtggttgtccaagtgtttaaaaaggtacaggcctgataatgtgtcactaggcactgggccttggcatcagatgataaacaaaaatgatgcagtaaaccctcccattcttctcctaagcagagtgggtgtcctgaaaggttatccagagattgaagctgcgttgtttgttcctgagtcctgtcaaagtcaggctacaagctgttagatgtagacaggccattgcacaagagcttttatacaggaagcttctggatgaggggctggggagatgaagccatcacagtctgcaaggcagctgaggcttattccagcctctgtgaataaagtcaatgataatgaccattaggctccagcccctgctatttcctaatgatccttatcagggaacctcttcaggtgttccctgaaattagtcaccctcataccccacatctcagagcctatgatcttgcatacgatggatgtcttcactgcagaattgttccagtatccctgggctaaagtttgactgagttcaaataaagcatatcacacacagagagagctggttaagctaatgagctgtccagggttatgtaatcacttggcttacataacttctggacatgatccattgtcataagcatttttttttaaaagaatgaaagcatatattaggcacatattatgtgtgatacaaagaatctctgaaccttacttcttatccctctttattacatgtagtagttgccttctccatgacccctagtacaacctgcttaccatctacatcctttgtgtgtttgccctcatttccatcttctacgacacaataagacacaagttcaacagctcagtgctgttccaaccccagatggtagcattaggagcctttccacctgatttcataattaaagtttccttttctttggaaaagaggaaatttccccatcagaattggacacccttgggagtgaacagtaaattgtcaaatatgtactctcccagaagtagagtggaattcttgatgtttcccaccatcgttattacacaacctccagtctctttcagaatttccaaacagagggaaaaactaggtggacttgaaatagtaactcaatccaacagatttcccacattagtgaaaaatagctttgttttctgttcactgtattaaacaaaatactgccctctagacccaatcgccaatttatagtaagtacaaaggacagcagaacatattaaacccatcacaaatatacagtaagcaaaatctatagtgtgaaaaactctgcaagacaaacaccctgggtctttttttcttcccacaataaactacaaagaatgagtaaggggatctatggattagaagagcctttaaaaaacatatcgccagaactttggctttcccagtgccccatgcttgcaccatgtagaagtgcaagcagacgaaacctcagcatgccaacttggaggaggaccagggtgagcagcaactgaatccagagttcgcagatgcagcctgaatggcgccagtggtgggggcccagggtgctccaatggatcaccaagggaatgatgatgaagcgaatgaggacaaagccatgtggtaaaatggcttcatcaggaggagatggacacctgtgagaaatactgtgcagagttctttagcgtctctgagttcttgaaacataagaaaaattgcactgaaaatccccctgtcctctccaggaatgacagtgagaggccatgacagctctctggagccagactgagccataccagccacccagtccaagtaataaagatggccacaaggagaacagtggcagctcaggggacatgaaagagaagctgggtgtggagtctgtggtgcacttacagacagagatggccctgccacccacacctaaggacataggctatttacccacacgcaaagtagccaacgctaatgtgcccatgcaggctctctggggcaccaaggtggcagtgaatctgtggagtgcaggtgcactgccagcctgtgcccagtgcccacagcatcccatgggtcctcgagcagatcttgtatctgcaacagcagctacagcagatccagctcaccaagcagatctacattgagatgaacgtgtgggcctcccacatcctccactgtggcagggcaggggctgacaccctgaagactttgggcagccacatgtccctgcaggtttctgcagctgtggttttgcttagccagaaggctggaagccaaggtccgtctctggatgccttgaaacaagccaagatactgcacaccaacatcccttctaccttcagcactctgccccaggactgatgccttttgttctgaagccagatgggaaaagggtactctcttccctttccctgtttgggaaaacatcatgtgtcccatactgagtgctttgctccctcaggctctgggcttggtgctcttccagggtactttctccactatggcattagacccgtccaagaaagggaaaggaaggctatggaacatctccaagcacaagtgtaagtgctctagcaaggtttttgggactgatagcttctcatggatccacctctgctcccacactggagagagacccttcgtgtgctatgtctgtagtcatcacttcaccaccaagggaaacctcagggtacagtttcacaaacatctccaagagaaggtgaacccccagttgtttgctgagttccaggaaaaaatggcaacaggcaatggcaacccatatgcactctgtacctgcccccatcaatgaatcgagcctctctttaaacagcaaacttgtccttgtaacttcctctctaaggctacctcagaatctctcttcagagactaacccgaagaacctcatggatggcctgttgcccaattacctgtagcccagtccttctgcagaaagtgagggcaggcctacactccttgaggtaaggacaaacaataattcaccaagtactggtggcttctaagtgagtgggacccccggccaggaccagagaccctaaaattgctgtagctgtttgagaacatccacaatgccgccactggcttcattttctactgattcctaagctatctcaaaatgtattactgcacatgcacccacacaccagggagagactattccagtataagatttgtggctgagctttttctaccaaaggcaacttgcagactcaccttggggttcactgaaccaacacacccataaagaggcagcattcatgcctcatctgccagagttaccaatgccgtgatattgcaacagcatattcagatgcacacgggcagtcagattcccaatattcccttgccagaggatccctgtgaccttatgatcctgatccaatgatggtcagtgaggatggcagtacaagtgccatctgctatgatgatgtccccaaaagcaccgatgtagaagtcagctcccaggagggcccaagcagctcctcaaagatccccgtatctccttccatgacggcttccttagatgccccaggtagggggagtgggtcctatcccttttggcctgcagtgccagagcagccaaaaaatggttcagtggagagcaatggcttgaccaaccactcatcctcactgaaatgagactaggagtgtgagagccaaagtccagacaccatggaaactaggtccttccaggtactctctggccaatagtgaggcacaaatcatcaagtcaatgtctcctgatgctgggggcaaatcagagagctttgagaacagatgcagggatggaaggttggagcaggctcccttcaacgtttatctgagcccagccaacctatgtcaaacttgaagttccaggtatatttgtaggaccctcaatcttgtctccagggatgacccctttgttagaggcccagctacactgacaggtcaagcaacacggctgcacccagtgtgggaagaacttcctgtccactagtcttttcagattcacagacagactcacactggagagaagccttttgtatgcaacatttgtgggacagcttttaccaccaaaggcaacttgagggtctactatatgacacatggggtgaacaataactcagcacaccatgggaggaagctggtcctggagaacaccatgtctctgttaggtacaaaaggaaaaagagtctcagaaatgtttcctaaggaaatcccagcccctttagtgaatgtggacactgttgtaaggaatcagtatacccccacacttgactgtggtctggcagtgaaaaccagtgagctctctctgatccagtgtagctgtattcctaccctcctggtttccttggaggctgtctccatcatgaataacaccaccatctccaagatgatggctcccaatcaggtgtcattgcggatgtggaaaaaccaggtgctattgacagcattcccaaacatcagttcctttacttcctggaagaaaacaaggttgcagtcttctttttttttcttttctttttctttttcttttttttttccagcttagcttaacttgcatggaaggataaatgcagacagagttaaatctctagaatctgcttttttttttttttgtaaaggcccatctcctcctgttttctttcttttttatttttatttttttcgagatggagtcttgctctggaggctggagtgcagtggcgtgatctcagctcactgcaatctccacctcccaggttcaagcaattcttctgcttcagcctcctgagtagctgggactacaggcatgtgccactgcatgcagctaatttttgtatttttagtagagacagggtttcatcatgttggccaggctgatctcgaattcctgaccttgtgatccacccacctcggcctcccaaagtgctggagttacaggtatgagccacccgcgctcggccttctttttcttactggtatgcaaatgacgtttatgaaggttgtgaccatcacctcaagcacaattgaaatgaaaatgaaaaaaatgaataaaaaattataccaaaacaaatatacactggatttttttttttaagcagcaggtgttgcaaagtagccttgttacttgtgacaaactatatacataggactttcgtaaaacctatggtgactttttctaagaccattatctacttcaaggtggaatcattggaacttattgaaccacagtggaagagacaactacttagcctaattggggtgaagggtattggtaaccgtatgcaggtaaacggacaagatctgtcatctatttagggaactgttttatattcccccaatcctgttaacatctttctttttctttctaaaaatatacttttaaaagaacaaaaaactaaggttgtacaattataaaattgcttcaaccttagaaccttaagtaggatgccctcagatggacttatgttagtgcttagggattcattgtgtgtgttgctgtttattcaaatgcagttcagtcagaaccgcaagagtgccaatgtcctcctcatacttcccaaatgcctttttcttcctgaacctgaggtggacacctgaatggggaatctcaggtgacttaatttagtttgtcggtgcctaccctattgaaaaaccgggttttcattcttgagaagaaactcatggaagggtgtgtttcctgccataggttcacacactatttttttgttttgtttaatttatttggtgcaacttaggaagattattttttcttgaggattttatgaaggctgtgaagttggaacaggtgagtcctgggtaggaaagcttttatttatctcccttatttatttatttatttgttttttagccatagtctctattttcctattttaagactactgaagtattcccaggttctgtcttaaacctaaaagtcagtgtattggtggaaagagttggatgttcaaggtgttttgtgattcctttatttgtaatctccttttgtatatgtaataatattgagcaaaggaaacatctctctaatggtttaacaagaaaggagaaagaaaaaccctaacttctgggagaagtctatcccttctatgtggaaggccctgaatgaaatgtagatcaagactgttagctaatgttttgcctcttggttattgcacctgattttaggcctttttatttttttgccatttgtgcctttccttctggaattgtaagtgaacacaataatggtatctgcttatactgtgaagtgtgtattgttacagagaccacaccagtggctttttcactgttgagctaataatgccttgtgaatgtatgatctttggagaaactcctgtagctgtgctgctaatgctgtctgtctgttggaaaataaattttgaatgttttctctttggaaaacatgtccacaaatcacaatatgtgactcttaggtgaattctgaatcagataagctgtaaaataattgaaaatgtaaacacatttaccaatttggttgtgttttaaaaaagtcaaaatttagtgatagtactaaaataagcaaaagcaaaataatatgatattttacaaatatatgaatggctttaaaaaaataaatgaatgagtaaatgtagttggggcataaataaaacaagattgaccaagaatcaatatttgatgaacatgggtgatgggtacatggggtttcattgttccatactgtatacttttctatatgtttgagaaattttctttaaaaaaattaaaaatagaaattggctagattcaaatcctgtcatctccattgcagcatgacttttgattctttaacctgttgatgtctcagtttcctcatccattaaatggtgataatagaatttacctcgcgaagtcgagttgagaattaaaattatacatatttacatacacctatatgtttaaattaaactatacatgattttatacagacagttttcgcacggtacatagcatggcatgtcgacgcagtagagactcaatctgtgacagccaatgttaatggaaagggtggaatttgttcagggcctaaatcagattttcaatcatgtgctagtttcataacaccacactgctccttgacacgtttttcaaaggaaagagccaaaactcattgataaggaaaggacatcttggcactgcttgaaaatcaccccaacaggtccctaaatccccatttgcagctccagtaaatatccccatttgcagctgctcccccaccagtacctaccctgctgctaaggcccaggccctgtcagagaagcagcacatgacggatgtttaacataaaagtgttttcagggggcaggcagggctgctttaattcccctaactaggtaatttaaggtatattttctcatatttgccaacagaccaaagaagaaatgctctaagatgtaatcaatattcacatcagccttcaaaccaatttgatttcagtctttcacactgttgaaataaacaaccctgtgaagtcccacacatcaagataaaagccaacaaagaaatggcatttttcccttgagcaactatacacctaaaagatgacttgtgaagcaataaatataggttatggagattttcccctcttactctaagagtacataaacactttaaaatgtatttgagatattattgattgctgaattaatatattttgtaagatgaggtaattattgacaaagaagatattctcatcctgtattcagtttaaatgcaagctgtcatacaaaaaagagatttaagaggagatttataacctgctccaggaagctaggagaaggtttcatccacccccaaagcgcagacacctcctcactcttctgcttgttcacagtaatatggatgccactgtgtctggtcacagatctatgtctctgcttaaattgtccccattgcacaaaatgtcctttctccatctccacagactaaacttctgtctcaacctcctatgactgtacttttggaaaggaaagtggggaacacagtaggtgagaaaagacatctgttttgctggttgataatctagaagatgtggtctagacattgaattattctcatttcataatttataagaacaactattaaaatgcccagtggtcctggataatgtatagtcaccattcttatcttacaagacatagctgtcctgatgtaaagatacaacgtgtgtaatctttccttctctaaacttctcaatcactctttaatctttgttgctacttaccacttgatatgttgcattttgtttctgaaaattcatgtctataactataccatgatcagaatggctaaagtgaaaaagactacactaaatattgacaagaacatggagcaacagaaattcacatattcggctggaaggaatgtcaactggtacaatttcaaaaacatttggcaatatttactatagctgaacatgtgcattccctgtgatgcagaaattcaatttctacctatatgcccaataagaagttacatatattcatttgtaaaacatgtacaagaataagaacatgtattacatcagtgattataatatcctaaaactggaaagcaactcagatgcacatagcagtttcaaagataaataaagtacgataatgaaatactacccagcaatgagaatgaataaacttgccatatgctcaaggcagattgaatcacacaaatattactgagtgaaaaatgaaagcaaaagaaattcaagaaaaggcaagactaagctatgaagttgtaagtcaggagagtgaagataggggctatctttacaaggagatagtgactcagaaagagtacaagggaggcttctggatgctggcaatgctgtttctcaatttgggtgctggttacataggcgatttcactgcctatgtatgaaaattcaccaagctctacatttaagttttgtgcactattctgaatctatattatactttaaaagtttttaaaagaaaccttatccatcccattgactaaattttgagaacatacttcttattcaatccatcttcatagccccactgcccttcacattagccttcatttaaaacatgcttcataattgttttctcaataaaggactgagctacatgtttaaaaagatgctccggtcccaggtcctaggatctagtatgttatcagatggacttgaacttccctgtgtagcttgctaattactgctttgagtttagacctttggtattgatgtggtttttctctgtctccactcaaatctaatgctgaattgtaattcctagtgttggaggagaagtctggtgggaggtgattggatcatggaggtggcttctaatggtttagcaccatccacctagtgctctctcgtgatagagttctcaagagatctggttgtttgaaggtgtgtggcacctccccctttgctctctctctctctctctcctgctgggcatgtgaaagtgtacttgcttctccttcaccttctgccatgaatttcttagtttcctgaggcctcccagccatgcctccagtatagcctacagaactgtgagtctattaaacatcttttcttcataatacccaatctcaaatagttctttatagcaatgtgagaatggtctaatacaagtatgttacacatggttttctgtaacaggcttttaactggcctccctccttccagcatttcctccccataatccactcccataccctacaaatgacttattcttttaagaaacacagcatcaatcacatcagtcctctgtttaacaaccttcaatgaccatccttttcctgtaggagtaaggttagttaaaactcatggtgtagctctcgatggcctctacagtagtcatgaactttctgcttcatcagattaagtctaacttgtgaatgaggctgggaaacatttactgtcctccattaacagctctgctcatagtcctttgctcccatgattacacctgtctgaatgcttaccatcattctttctcctgatcctagagactatctcagaccattattaccttgtgaagaattttctggtcaccccagctcacagtgatctcttccttctgataaattaccccaaatttttaaaaaatatatttcaaaaaatctttttttcaaaaaatatttttgaaatgtatttttatatattttatgtatgtttttaaaatatagttcacttaattttacagtgcacttttataagcattatctcattcactgtttataataacattgtgaacaaggcaaggtacaaagaattaatctcattttgtagcttaaaaactgagattcagagaagtgaaggggcctaagccagtgtgctcagccaagggtaaagctcactcttctcacccgagctctctataccaaattaccttattatgagtatatacgttatctcctcccaaatatacatttttttctaaatgttcttacacgtttgtatgtctcataatactggacaagacatttacggggctatgtagagctgagtgattttatttcaatattgttcccagcaagctcaaggactgacaaagctgtaccacctctgctctatgggactactgtagcaaaaactgaattgtagaaaaaaacaatcactgcatctccaaaaaatctgcttttggaagtaagaaagagacaagaaaaataatcttttaaaggtcagggcagccttaattttacctttatatcctaggctccaatattgaaaagtttcaaagaaggctatcagaggtaatgacaatgggcttcaagaactacaaatgaatcacaatgaaataagtttcaaattgatcaaattccagaaaccactcctcagataatttaactagtaagcaaaatggagaactttttgattttgaagcccagtttaacagaatttaaactatattaatataaaacttaattttctttattccaaaggctatattatactaaatctttctggaagctaaccacaggactaatgtgatgaaattgaaagaatggggaacaaactaggtggatgtctggacaccccaaactgaaggtaaatgctaccttctaccctaacattcttgacttccacaaactcaggtgttagacacctgagcactggaagttaaacaggtagatatgaagactaagaaaagaagagggagatagagggaccaaaataaatctgaatattgtaaagaaggtattcacacagtctttatttgcctagtgctaaatacatccagtgtctacttctagtctgacccttcattccaaatgcctgtgtctgggctaacgggagcatagacagcgaatagaatttgctttactgtctgatcttcactcaagtgaaagcaatttgaggcaggaatcatgttttgttttggtttatgtgtttttttgcagagctttacatgtcatgtaagtcggaatttctggaatgagtacttaagcttagggattcctgagcatgcataaacatttaagagcggctaggtgatctgtctagccagagaatcttgtcagcatgtaactgtactcaagaccacaattttactaagagttgaagtgtgtaggtaattttaactggtgagaaaattcatttaggataaatatttattatttgaagattatttttatgttcactttatttttgccatagctattgttactatactgacagcacttccaataagaacctgtgtaaaaaaaacaatatagtggtcctcagtaaaaaagtcccaatgctttaaaatggtttatgtaggcagagaactatgctttaacttcttactataatacaaccataacttgcataaagtaaatccaatcctagagcaattatgagctatgaattctgctggtcttatttcattagcacaaataattttaaaagggctagacaaacaggccaacagatgtcgagcaaacagaaactttaactgagattcctgaaatccctaataaaacaaataaacaggagacagccataataaaataaatgcctctgtaatgaagagaagtgtgtaatagtaagcatctaaacctggcattataaaagaaacaaaaagtaaaaagatggtgtttcgaaaaccaagttactaaagtaaggttacctatttatcataaggctaaaggtgtaaggctgctgtcatccaagtatgatccagggaaccctagacagaccttttagggagtctggcattccaaaactatttttataatgataataagacattatttgccttttttactttcaaagtctcgcaggtgtatatgcaaggtttccagtctacatggtatgtgataaggtcatcactctgatggttaatggaatatatctctacctctatctctatgccacataaacacaacctctttagagtcttcttggaatctctcagtgaaactataaagggatcctgagaccaacaagtttgagaactgatggtttacaggctacaaattcaatttatcacaatatgactttgaataatattttaccacttcacacacagtgtaataaatttacagcatttcacctccattctttgtgctattgttgtcaacacatttttattctacataagttaaaagccccacaatgcagttttatggtttttcctttaaaaaattatcttttaaagttttttttttagcacttcaaagtttggttctgacatacattgtttctgatgaaaagctggctgttattcttagctttgactccccatacctaaagtgtctttcctcatttttctatcctgtcaccccaactgctgttaaaattttcctttttattactggttctcagaaatttgattacaatgagccttggggtaattttctctatatttcttctctgtatctacgaaaaactttcagccattatttctttaagtatctttctttctctccctctcttcttctgaggcctcaggtacacctattttagattatttgattttgtagagttcaggagcactatttctttttttaaaatcttttttctttgcttcagtttagatcatttctactgctttttcttcaagttctctaagctttttttcctgtgatttctaatctgctgttaatcttgtccaacttatttttcattttatttaattgttttttatttctacaagttccacttggatctttttacgccttccatttttctcctccttatgtttctatatttttttacatccttgaattcatttttattgtatgtatgtagtttatatgcactgttttaaagtccttttataataatcacataatctgtgtcattttaaattctgtttctgtttatctttctcccggttatagactttattttcctggttcttcaccagcttgataattttgattgggtgctagatattatgtattttacattgttggatgcacaatttttttatattactttaaacaccattggacattgtactgattattaaataatttgcttatcattttgattttttgagacttcttttaatttttatctgaacagcctctattctgggactaattaaagtcactactaatttatcacctttctgaggattctagtgcctgccctgtgcattacaatgtctcttgaatcctggatgctagtaatacaaactatgcccagcactatgtgaactctggaaattatttggcctgttgcttctctttgcctgagtttcctctcatgtatgtacagatcagccaaagacaaagagtgacccctccagagccagagttctcttctgaatctctctctccccctctttctctttgtctctctctctttttctctctccccaaatccctcctctctggtacacttattcatacattctagatgctttaggatccccaatctcctattctattcctcaacacaacgaggcagctgtgctgtgttgtggttaatcctccctgtgctgttgcctagaaactgcctccaggaaataagtggaagaaatgttaggactcacttcatttattttcattatctctgtattatctgtagtccaaggtctgaaaatttcctttattttgtccagctttttaatttgaagatcaatttctgtagcagtgtacatttatcaaggaaacaaaagtcaaagtaatttatttgtgttgtattttacagttgtagtggtccatgataaattggtgaaaacactgattctttatcatagattatttgaaaagagccacattagataatgtttctaacatgcattatcatgtttataagatgacatgctgattgtgtcttggggacttaatagaactgattcagataaaggaataaaggagagtagagaggactttctaggcagatgttctctgtcccatgagaaccataaagacatgtgcaaggaggaggcctcagatttttctacttaaaagttgtgcctggaattatttgggattattatctgtacccaaggagaaaatgatgcgagtaataattgaacattgccccaattattgctgtgaatctataaaaaatgaatgtttagtgctttcttcttagagtcctattccattcttcttaggtatctaccttcccttcaagctattttattaaaaacagggtcaaggttctttttggtttttattttctccaagatggtggattggaggcatcgtcaacatgcttctcccacttgggaagacaaaatagtgtgtagagactcacactgtgaactttcttccaagaagcaacacaggaacttaacaagaaaatggaaagaaaccacataccctttgaatgaagcagcaagttggctgggcacagcggctcacgcctgtaatcccagcactttgggaggccgaggtgggcggatcatgagatcaagagatcgagaccatcctggccaacatggtgaaaccccatctctactaaaaatacacaaattagctgggcgttgtggtgcgtgcttgtagtcccagctactagggaggctgaggcaggagaattgcttgaacgcgggaggtggaggttgcagtgagctgagattgcgccactgcactccagcctggtgacagagcaagactccatctcaaacaaacaaacaacaacaaaaagcagcagcaggttgcagcctgcactgtgagctagttggaacactctaagtccccagagtgtgagagggttagaaactgcttctgggatatacatgcccactggggaacctggcaatccaggctacggggaaagacttaatcctaccaagccctagagctgatttagtgagccgcacggggtacatgagaaggagcagcattgggatgtgctttgcatgcattcccagtctccagtggggacagagagaagccatttctgatcctcacaggggacctcgcagacatctgccagctagctcaggtggtggttgagagaagctcccaactgagatttgcaatataatctcgagtggggataaactcctttagcccaaactcagggacaagcagaaagtgtactataaccatgagcacaggagctaaatgcccctgccttgcaggtggatcaggaggggcatggcctgaaaaccacagtttctgtctctatggggaagccttgtggcctggagaagctttgagttctgagggcagactgcttggaatctagctagctgctgatagtgaaacactgcaggtgtgagacctgccttgccaagtgtgtaggggctgagggaggcttactgctgcctgctactccccactccctatgtggaagagtccacatggggaagtgccttctgtgcaatagaggcagctgtactcctctgcttatgccagcttgtgcctccacttgtgccagcacgcagaacacggacttccctgacccagccccacctagctttgcccctccaccagctccggttgcttaacacaaaggtctgagtcttttaggagctatatcgcccttcccattgcctgagacaccaaagtacctctcccagtaacataaggcaagcacaaatcccaccattattaccacagttggtagtcctttgcaagcactatctcctggctggaggccaaccaacacagtccttcacagcatttgtagacagaataaaacagcaccaagaaagaggaaacttgagtgtgatctcaactatcaccattgcctgcagcaccctggctaaccaggaggtcctcagcatgtccacatgatcagttcgtttactagtataactggcatttgaggaagccaacacactaaagctattcataactaagcaatctctcagagtctaagtcactctcctgccactcccatcagagctagtgctggtagccacttccgggagacttgagaacaggtcacatcactagatcccttgcagacattctgcagcaacagcctggaggtatcagtcccactgggtggccagatccagaggagtagcagcattcacagcagtctggctctcagggactcctacttctaggggtaaagggggtgcactatatcaagggagcaccctgtgggacaaaagaacccagatggccggtcttgagtcccagaattttctgctttgcggaagtttctttcaacagagtcacaggtgcagtgctgagctcagcagggaaagcttgtggctctaactaaacagtcagtcagccctggtgctagtgaagggtcttgaaaagtagaattctttttccccctcatccaccactgcagacacagctggaacttctcccacggaagctcagtgtgggtgcatctgtagacaacctttccagaacacttcaaggtaattgcatccccacaggaaaaatgccttccaggtttagtcttacacaagggggagagtcacaatccctgtctacatggaacatcagcactcatgcaggtgagaagaggtgcctatacgatctgtatagctggaacactgggccagcagtatgactgggaggtggatcactttcctgctggactggcagggtagctgaggaggctctctccttccccttgaagaggactcagtgcatttcactgagagttcccccagctgcttctgtcaaggctgggacctctgcccacctctaaatattgcatttacccatctgctttagccacagttgtttttttgttccccttggacatctcttactggtctgaagcctgaactgttccacccagtgaataaaatactggggaaaaaaagtaaataaataaaagggtgcacaccactggagaatgagacaagcgtcaagacgcctctgccattcaagccccacaggagacaatgaacctgctcacatactgggaacattgctactacaaccagcatccaagaaagctgtcatacaacggctttctataaccaaggagctcatacagaattcatctctgaaagcacccagagccaaaccagattataataaactataatcaaagtcacatcctcaagggggcaaaaaagaaattaaaaaacccacaagtgagtaaaaaataagttaaaaaataattagaagaaatggtctatccaaatacaagaagtgcaaagaaccactgggagattcaaccatacacacaaaaatgtgacccatggtcgaaagagaaaactgttaataaacccaaaaagagatgacccaggtgttggatttattggatgtactttaagataaatataataaaatacaaatggatctaatagaaattgtagacaatatgcatgctgagatatgtaagtttcggagagagaagaacaaacatatgtatagggaataggttaaccagtatatttaaaaatatgtatacaaaatatgctaaccaaaaagaaagattgacaaataggacacgaatacaattttaaaatggtgctcatccaacgacagtattaagaaagtcaattagcaacctaaattctgaaaaaatattcaagaagatacagctgaaaaaatattacttccagaatatatttaaaacctcccataaattaacaattaaaaattacacaataataaaatacataaatggtgtaacgagtgagtactgctatagactgaatgtttgtgtccccccaaattcatatgttgaaatctgttgtgattttaatttatgtcttttttttttttgacggagtcttgctctgctgccatgctagagtgcggtgacacaatctcagctcactgcatcctctccctcccgggttcaagcgattcccctacctcagcctccaagtagttgggactacaggtgtgcgccaccatgcccagctaattttttgtattttagtagagacggtttcatcatgttggccaggatgatctcgatctcctgacctcgtggtccacctgcctcagccttccaaagtgctgggattacaggtttgagccacctcacgtggccaatttgttatgtcttcttaatttggacttgaagtctctctcctgagaatgaccataagccaagataaccactgcctaggacagccttgactaggggaaaaattaggtttaggtgtgtgggtcaggtaaaatggaatggatctttaaaacttcatgttgagcaatagaaaccaggccctcctcccaacatgctatataaggacgtgaagcgaaaaggcataaaatagaaggaatttatttctcccaggtcccagagaggttataggtgccagtgggaggctgatgggaagttcagaggcagcagggagctcaaccagtaggtgaagagagagagaaacagagggagagagaggcctgtgggattatacgtttattaaggttcatgggtattatcccttaggcttatccatgggtactgaggactgtctagttcaaagaaaacacataaaaaggggagaaattatgtacacgactctggcgttggccattagatttatcatggttagcagctgtggaaagtgttggattttgggtcagtgagatgaagaacaaccatacagggagtggaagttctaactaggccaagggagatgaagtatgacttatgtcaggcctgaaaatggacgccaaggcagcaaccacattaaacaaacttatgacagaactgaattaccagtgtggtcgtatttggaggtgcggcctttaagaggtgattaggtaatgagaataatgtccatataaaagaggtcacagagagcttccttgcttttttggcaatgtgaggacaccgcaaagatgactaccaacccgaaaacacgccctcactaggcactgaatcttctgggagcttgatcttggactatacttcctccagaactttgagtttctgtttttataagccacctatctatgatattttgttacagtggcccaaatagactaagacaaatctataaaatatgttaaacatcataagtcattagggggatgcaaataaaatctacattccggtgccattcatccccactagaagcactaaaaacaagccatctgacaaccccaatattggcaaatatgtggaacaactagacagttcatgcagtgctggcgagaatgtaaaatggcaccgcacaatcactttggggtcttgcaatggcccagcaagaacactcacagatatttagcaaagataagtgaaaacataggcccataaatgatccatacaaaaaattttgtatgcacctcatttatatttgttgtaactggaaacaatttaaatgtccatcaacaggagataaaaaagaactacggactgatacacacaacaatattaatggatctctaaagccttgtgttgagcaatggaaaccaggcccttccctcaaaatactgcatgataccttttatataaaatacaagaacaaaaactaaactatggtgatacaagtaaaaatgtggtttcctctgggaaggagagtttgactaaaaaggggcacaaagggatttttctgcgatcatggaaatgctctacatattgttttaggtgatagttacacaggtgtataaaattctcaaactcattgaaatgaatacattgtatctgtgcattttattatgtcaatcatacttcaatacaaaagaaaccaaaataaaataaaataacctatatagaaagaaatgtgcccctgcacaattgtagggctaggtaagttttcacaatttggaaaagcccatgtaaccagcacccatatcaagaaaaagggcattacccacatggcaggccactcttgtacctgcttcctgtctctaccagcccaagtaaccattatcccgacatctaactgcacagactagttttgcactttaattaaatgggatcatttagtatgtactctggtttctagctaattttacacaatcataactttatgagatgtatttgtattattatgtgtagccataaatcttcattctcagaactttggggcattttattgtctttggtcatttcatttgtgtatatttagcttcccagggcaaattaatgaccagctagtctttgttgattccaagtctcagacagctatcagagtagactataatcacgacagaccacagctgctctagcaattggaaaagtatagacaaattcctgcaaaaactgtagaaagctaaaaatattaatttttctctgtgtatatattattttattttggttcttttttatgaggtataattttttctacaatgaaatgcacttacatgtttagtttaatgtgttttgagaaccatatacacccatgtaacaagataatatatagaacattccctacatccctgaagtctcctttccagtctaatttttcctcctacagacaaccactttctgataattttatcactagttaaatcatcctggacttaaaaaaaattaattttctcataagagggactttaggtcattatattatattcaattatattcactcaaagaagagagcataaacagacaattaaaagctgcagtcaactgaatcacactcacatatctgcacattgacaccacacaaatcagtcaccaactttcatgctgctgaaaggtaaaactatagagttgcccccagtgaaaaaagtctttcagccacatctgccgcagcagtgggctgacagagggatttgcaatgttccaattgctttatttatgatataagagaataagaatgcatgctctgatgagtttggctgcactcatttagactatcgggtgcaatgtttgaaagccagatttttcctagcacagacttactattgattgctattgggcacatgcaacgggacaaattttgtcaatcaagaaacttgctgtaatgccattaagcaaacaagaaactttatctaatataaattttcccagaatccaatggcttggtgcacaggaagaaagagttataatgattgagagtgaaaagttttatctccctgtctggaagaaaaatctgggaatatatttcactgtagatttcagccagagaccaaaaagcatacaccatgcaaaaagatggatgataacttgttctcagtagtcatcataacccataataaattgttatttcttatgaaacttatgagtctatctctgatgcattggctgaatgtagcaaatggttgaatcattaaaaccttcaatttaatttaactcatgtacatgtacagatataatttctgtctattaaattaaaataagaccaaataggcaggttagaatctccaactgtgtcaaaaagctatggcttaacacaggcaaactgatatcagcagatcacattttctcttctggcagaggagcaccttacagctcggcactcagaagaacttgcaacattctgctcccctgcctactgaggatagtcatagcctctttctgacaaaggatggtaaagatggccacaaatgcaggactccggcttttctcagctttaaaatctgggggcagcagcaggttgttattttctcctaaacctgatggggtttaggggaaagaggtaatggacagggagtcacagccccgtcctacattatttccttacaacctcatgggtacccccaggagaatcagcataattctctctcccttccccctctctcatctcttttctctctctttttcaggatctagctagttccagagggtaactcaagccctgaccgaaatttatttttatgctttaagttctgggttacatgtgcagaacttgcagttttgttacataggtatacacgtgccctggttgtttgctgcacccatcaacctgtcactcttctaatgttatccctcccctacccacccaaccccaacaggccccagtgtgtgatgttcccctccctgtgtccatgtgttcttatagttcaactcccacctatgagtgagaacatgcagtgtttggttttctgatcttgtgatagtttgctgagaatgatggtttccagcttcatccatgtccctgcaaaggacattaactcatccttttttatggctgcatagcattccatggtgtataagtgccacattttctgaattcagtctatcattgatggacatttgggttggttccaagtctttgctattgtgaatagtgccacaataaacatacgtgtgcatgtgtctttatagtagcatgatttataatcctctgggtatatgcccagtaatgggattactgggccaaatggtatttctagttctagatccttgaggaatcgccacactgccttccacaatggttgaactattttatagtcccaccaacagtgtaaaagcattcctacttttccacaacctctccagcatctgttgtttcctgactttttaatgatcaccattccaactggtgtgagatggtatctcattgtggttttgatttgcatttctctaatgaccagtgatgatgagcattttttcatatgtctgttggctgcataaatgtcttctttggagaagtgtctgttcatatcctttgcctaattatttgatggggttgtttgcttttttcttgtaaatttgtttaagttctttgtagattctggatattagccctttgtcagatggatagattgcaaaaattttctcccattctgtaggttgcctgtttactctgatgatagtttcttttgctgtgcagaagctttttagtttaattaaatcccatttgtcagttttggcttttgttgccattgcttttggtgttttagtcatgaaatctttgcccatgcctatgtcctgaatggtattgctcaggttttcttctaggatttttacggtcctaggtcttaggtttaagtctttgagccatcttgagctgatttttgtataaggtgtacggaaagggtccagtttcagttttctgcctatggctagccagttttcccaacaccatttgttaaatagggaatcgtttccccattgcttgtgtgtcttgatgggaatttctatactaccaggagaatcactataattttctcactcttcttctcctctcctctctcctctcctctcatctcctctcctctcttttctctctttttcaagatctagccaatcccagaaggtaactcaaacccaggctgcaatttctatgctgcagaaggaggctgtgaccttggattgtgtataagaagctaaaacttaattattatttactctggtacagacatccaccaagtgggagaattattttccttatagatcaggagtcttttaatgagcagaatggaacaaagggttggtattctctgaacttgcagaaaccagccagttccatcagctgtattttcacagcctcacagcttgaggttttggcaatgttctttcatcccctgagtgaaactacagtgaaatattcacctgaggggggcctaaaaaattcatatctcaatgtcccccgatataaacacctgggcaagagtcacagtgtgaacaggaagaggcagggaggcactgtcaatggagatggagatttaggagaaacttcactctaaggaaaatgttctctctggctcagagaacatatcttaaattgtcattaatcaaaagcgtgtttatcttcagttctttatcttgaagtagattattcggcaaaagatatatatatatgtgtgtgtgtgtgtgtgtgtgtgtgtgtgtgtgtatatatatatatatatatatttttttttttccaagatggagtttcactcttgtcgcccaggctggagtgcaatggcactatctcggctcactgcaacctccacctcccgggttcaagcaattctcctgcttcagcctcccaagtagctgggatacaggtgcacaccaccatgcccggctaatttttgtatttttttgttaagtagaggtggggtttcaccatgttggccaggctggtctcgaactcctgacctcaggtgatctgccagcctcagcctcccaaagttctgggattacaagcgtgagccaccgtgcccagccaacaaaagattttttttagaaatttgtggtgactacattaaagtgtgaaactgactcttaaaaagttaagaaacacttggccaaatccatatgcgaattgttagatgatttgtctgtatattgccatgacttgctcttcttctttttatatttttttctttcccgttgagtgacctacttgatttacttaatttctgggtggatattccttccattacaagtcctagcctaagacttaaggaaaatgagcttgcttttctactttcctgactctggttccaaaggccgaattatttccattggaataaaaacttcttgattcttaacccttaaggagacttttagaaagtattatcctcaattgtaatattggtcttttcaaaattcacccatgagagcaaaatcaggaccctgttctgggaagaagcatgactacgtcccagggagccaggccatttggccatgaaactgtgattgtgaaaagacgtagatgaaagcatatgactttcacaaaaagtaatgacaagaagagggatttcttattcttgggacaatttggagagaattagtcttttcttcaggaaacatgtgcctaaatatcagaaaagaagtcatagaagaagaaagaaaatctcgttttcagttcattttgatgacttaaagatggatgggcaattttcctggggaatattaaggtttaaaagaacataaattttaggaaaagtttccagttattctcaataataagacagatataaaactattttccaaatctataatacaaaattgccctgtgataaatgacaggaaatttccgaaggtgatgggttgaaaacggtgtgatgtggtccctatatttctaaattaaattttcaggtagaataatcatagtgagataaaaaggaaatttttcagcctcaaaatataaaaggttttaaagtcatctattaaaagtctttgatatacattttggttattcaaagcagaataaccactgtacaattccatttatataacattcatgaaataacaaaattgtagggattaataacagattagtgattgtcaggggttatgactggggagaaggaatagctgtggctattaagataaaaataatgaactattcctcctatccaaaaaatctatttataaataaacatcataaaaaataaactcaaagtgaatcatgaaattaaatgtaaaatgtaaaactgtgaaacttttggaaaaaataaaatcttcaagatgcagagccaagcgaagagttcttaggtttgacaccaaaagcacaatacacacacacatatacacacacaaattggatttcatcaaaatttaaaacttttgctctgtaaaagatcctgttaagaagatcaaatgataaactacagactgggagtaaatatttaaaaaccaggtatctgacacagagttgtagctagaatatataaagaattcccaaaatgaaacagtaaaaaaaaaaaaagttagaaaatgagcaaaaagcattaaacagatttcactttgaggatatacatattgcaaataagcatatgagaagatgatcaacattatcagctatcagtgaaatgcaaattaaaaccacgatgagatattattatatacctatcagaatggctgaaataaaaaataaagataacatcaaatgctgttgaaaatttagggaaactggatcactagtatgttgttggtagggatataaaatgatacaggcactccggaaaatagtttagcaatttcttataaaattatgcatgccttaccccatgacccagcaattacactctttgggacttatcctagagaaacaaaagcttatattcacaccaaaacctgtacatgaatattaatagcagctttattcatcacagcccaaatctggaaacaacccagatgtcttccagtgggtgaatggttaagcaaacagtggcacattcataacatagtctattatatagcaatacagaggaacaaaagcatttatacacataataacttgcatagatatcatgcttttatccctcatgcagagtgagaaaagccaattttaaaaggttactactgtacaattccatttatatgacattattgcaataacaaaatagtaggagtaagtaacagattagtgattgtcagggattaatgatgtggggaggggatgggtgtggctgtgtgaaggagtagcatgaggaaagctgtgattgtgaaaccattgtgagtcttgattgtggcaatggttacatgaatctatacatacgataaaattgcatagaaccatacacatacaaattagtgcatgtacaacttcagaaacctaaataagctctacagattataccaatgtgaatgtcttggtttagaaactgttctatagctacacaagttgttatcattggggatgctaagtgaagaatacgtgagacctctatatacattttttgaaattataatactataattatttcaaataaaaaataaaaatatttttaaaaattaaacaaaactttgcataaaactcacaattctaaatcaccttctgtggctctgttacccatctatcacacattcagtctaggttctcttagttcctgcactaataaatataaatataaattgtccctgcattataaataaccctgccccaatcttgcgtttatctttcgtctttttcgccttttttcttaggtacatatattcagaaacagagaaaaactgcctattgaaaatgatttgtaagagtcagagtttgctaatgtgggtaaaataaatcaaatcagtcaatgataaattatatgcaagctagtgtaatgatttgtagataactgagaaattatcttattctcaaaaaaagtcaatgaacaacgtgtttatactgttagtacagtatatgctcggtaacttttttttctgctgaatggaagaagggttggaggagcatcaaagttaatggggactaggagcagactgctattggcacaaatccaaagagaattcgtgtaagtgatagataattcaacgagatgagcacatatttaatggcaaaatttacctacaaaattattggcatatgataaacacatctcaattataaagtccagtggtgtgtcatagaatcaaactaattaggcaatactagttttgccatgatatcttagcctagtattgctaatttcaatgttcttggaaaaacagtttaggagttatgtcagaatattattgaggttaattttcattaggtacctactcttttaattcagcaactcttatttttatagtagtgggtattgtctaaattatgattaccttgaaatttttatacatttatttgaaactagacatgctcactcaaaaatttcaatgaagactaaacatgtagaaaacgagaaacagtcttaaaacagaagggcaatagggtggagacaagttcgatcatacattaaataatattattaagctgaaataattaaaaatagttggcaatagtgaaagtataactagatagattgatagaagacagaaacaaattacatagagaaaattactgtactgcaaagatattactaatcagggagaaaataatagatttttgagcgcataatgttgagtcaattgtctagccacttgaaaaaaattaaccccttaccttattccttagatcaaaataactccaaatgataggcttaaaagattaaatataaaacataccagaaattttcaggatttaaaaaagtaagcttagagtgggtcaggttttctaagcaagaccaaaatttcaggagacattataaagatgaatgcatttgaatataccataaggaagagatatatgaaagcaaatatttctacgtggcaaaaatacaataaaacagcaaaaactaaacgccaaaatggaataaaaagcttcaaaatataaagtcacataaaacgtgactttaatatataaagagctttagtaaaccaacaaaaaattaactctccaaaagaaaattgtgctaatactataatagctaatgttacttatttgttacgtggtagccactattttaatttttatctaggtagtgtgtaatctacctgtctacctatgcatctatcattatcaatcaatatatatctgttggtttcaatacatatttcaagtgattctcacagtaattctttaaggtttgtactgttctttctccaccatccaatgataaaactaagctcaaagataaaactaagtcacagaaaatctctgagcaattttttcatagaaaataaatcatagagctagagtttgatcactggtattctgtctccaaaatgaacacttaaacataattttcaatagactattcaaagagagacatacaaatggattttaaaattattttttcaacccaggcttcagtaataatagagaaaattttgaaatggtattctgaattagcatttttcacctattaacttcagaaagataaaaatgtttaataatacattgtgttggcaaggaagtgaagcaatatttattaaatgaaaaatgcatgggttctctgttatcatttacatattttcaataatttttataaatatatttgttcatgttggcaaacatctttttatggggataaccatttcagcataatctttggtagtaaaagactggaaatgaaaatacaaaaatgcaaaactgtttaaatataatatagtacagccaaacaatggaatactacgtggccattttgcatggacaaaaaacaaggcacagaatgatatgtatgtttgtctgaaaataatgagtatgtacgtgtatgagagtgtttgaaagaacagatgcatagatgcctctataatgagaactgtgatactgaaggacagatgaggaggaaagacttacttttgctgtgtattatttatattgtgtaaaatatttataatttgcatggaataatctccctcgccacacacacacacacacacacacacacacacacacacacacacagtgactttcaggtctctctgaggtccagaaatggagacctcttttttctctctgttatgctttttcaaaacttccttccttctaatatctaccaattttgtgaccctgaattttggtcacagttggtctcaatcctgtagtcacacagaaaattatttgaagacatggatttcttaatttatgttccaaattctctgcacattgcatcagagaggtttctagacacatccacaagctatttgatcccctcaactccatcttttattttcagagctctagtctttttaaggtttcacctgctgaggttttgaggttttaaggttttaaggtttcacctgctgaggttcttgtgcattctagtgaaaaatatattttagtgagaaatataattacagctaccagtcggattcaactcctttgtaacttctggttgcagcttagctttaaaaaccattcaaaaaacaatctagagaattaagagtccaagtaaaataaggcttttctcattgccactttaaacctcatatgcactatgcccaccaaatatgaagaatatttttctttgtaggtggcataaagtgggtaccgtgggacagtactgtggccacgaggtggcagtggttcaatttactctcattctacaactgcctttaatttcaaaagcatgaaaattactagaggacttgcatttgattggttgagcagccaacagaaaggctctttcctgcattacagaatatgaactaagatacagaagtggcgcctctgagaaaagaaggttggaattatcgtaatttgtttctaggctgagataccagcatggagaaaatgttggagtgtgcattcatagtcttgtggcttcagcttggctgtaagttggaggttaagaaatgagaaccattcgtgcaaagctgaggaagagagatgaagatttaatctcagctcattcagttttcctgttggaatttttcaaagctgctaaactaaaagctttgtataatttctgattttgttttcctgaacagggttgagtggagaagaccaggtgacgcagagtcccgaggccctgagactccaggagggagagagtagcagtctcaactgcagttacacagtcagcggtttaagagggctgttctggtataggcaagatcctgggaaaggccctgaattcctcttcaccctgtattcagctggggaagaaaaggagaaagaaaggctaaaagccacattaacaaagaaggaaagctttctgcacatcacagcccctaaacctgaagactcagccacttatctctgtgctgtgcaggcacagcgttccccaggcacctgcaacttgtatcaaaaccctgcagctgaggatctgaaatgatggcagaggtatctctgctgttcttcctcttgaaggagtatttatttaatgcccaggacctttttccaaatggtcctttggagaatgaagtcatgagacaaagccagagggcagggactactgttcattctgtccaggcatcctagacagtcccttgtgcatgttcatgggtcagtctactcttaataacatcccagaacttccctcacataaattcagaagggccagatgtaatatgaagagtcctggtttccagttgcggactacttggaaaaagactgcacaggtgcatacactccctgccgaaaaaaaaaaaatgtgtgtatgtgtctgtgttgtctcacaataatctggtcacgttaatataagtaaatctttttcattttaatatagtcttcttgaaacccacatctccaccagccacatctctatatttctcatcccttcatcatcaaattacttgaaagaattgtctggactcattctcttaatttccattcttcagtctcattcaaacctggcccctgttagcattactccaagggaagttctcactttaacaccagcggttttggtattgataaggctatcagatatttttcagtactcatcttgtctaagatttgcagcagtctttcctcccttctcattaaaataaatgttactttaatcaaaataatactcacatatatttacaaaactcaacagcactgtctcacaccccagtcatgtctctccattctcaggtgatggtactcacatttatctgaacatttaaagatgctgtttcttcgctttcttctctttctttttgaaattgaggtacaacacataataaggtgaataaaactttagcttacagctcaatagaattttacacttctttgtatctgggtaacaccatccagacctacatattgaaattttccattactccagaagatttccacatgccccttccaattcaacggcccttccccaactctccacctggagtaaccatgattctgcctttcatcacttggtcttacactttgtgtgactggaattatattgtgcagcctatattctactgtctcaatttcttctctcaatatcatatctttgaaattcattaatgtttctgtatgcatgttattttaaaatttatatgtaaaattcccctgtataaatatgtaataatttatttttccattcttcttgaaatagacttttgggttttttagactgtttacagttttgtgccattatggaaaaggttgctataaacatttacttaaattttatttggtggacatataaactcactattcttgggtaattccactggaatggacttgaatggacttaactaggccataaaataggcatgtatttagctttagtggttattatcaaatgtatttcgaaaggctaccaagttgtatgctcttatgaacaatgtatgggagttttagttattccatgtcttcaccaaaaaatggtatcaggtttctttttgtttgttttttaatttaagccattatggtgacatgcagtggtatctcataaaattgtggttttaatttgcttttcctgaagaataatgatcctgagcaccttttcatatgctcattgtccatctggatattcctttctgtctagtacctgttcaagtcgtttgcttatttgtttattgttcatatgtaggcattcttcatagattctggctataagcccctgtcaaaaccatctattgtgaattctccactaatccattacttgactcttcactttcataatgattttctttgagatacagaaattcctagttttggtaaagtccaaataactatttatttttctttattggttagtagtttttgtgccctattgagaaatctttgcctacctcaagtaacagacacactttttttcatgtaggtccatttgccacctcaaatcaattttcgtgatgctatgcaaaaggtgtccaggttcctattgccccatgaccatttaatgaaaagatcttcctttcccccactgaattgcagtggtgtttgggtcacaaatcaggtgatcctacgtgtatagctctatttctgcactctattttgtttcttctgttagttcagcctcccagctatctcataatgtgcttattaatatagctttagaatagaatttgaaactcatcagtgtttttcttcatctgtgttcttccccttattattttatccattctatgtcctttctgaatccatacaaattttagaactagtttctaaattctaaatcattttcacatctacaaaattgcccttgcagttttgattggtattgcattaagcttatagataactttgaggagaattgctacctcaaaaatattgagtcattgtgtcaaaaatatagactatctacctgctaaggtcatctaatgtcttaagcaatgattttagttctcaatgtagtgatttgcacatcctgtatcagatttacttccatgtatagacatttcatgcagatttaaaaattttattttctaattgttgctagtgtatagaaatacaattggtttttacatattgaccttatattcattgaacttgctacacttactaattttaatcatttggtcatacattattttggattttctaagtccacaatcatgccatctgcaaatgaagaaaaatttgtttcttgcattataatctttgtatcttatttattttcctttccttccttattggccagacttagtggaagagttggccactctatttagatctgcttatcatcccagggaggcagggacttaaaaatgtaaaagatataaagtgagcgagtggtttatggagttctagctattgagtcaaagtaatgactaatgccctacttataaatagactctaaacaacagcatcggctctttccacctccgctttgtgtagaagaaatgcagggaggcctagaaaaaagggagcagaagtagaagcttcctgatttaggaagagaggcacaagtgttattttacccacgtcatctggttttgttgtatttaaccctttgggtttacagccttacagtttgcccaatgtgttcaggtgaagcgatacaaaaatcaccgaaggattcctgctttacctggtaccaattttgtcattctcatcatcatctttatcgtcacaaaaactatgaagtaatattaacccatttctcagattgggaaactgaggcttacataagttttgagatgaaagcatttctgagataaagtaaatgctgcaggtaccataaaataagacgaagaaaaacatataaaacttcagagttaaccaactagacagcacttctctaattttactgtacatttaagaatcacatgaagagtttattttaaaaatgctttatttccatagattctgattctataggtctgatacggggtcaggagtctgctttttttagtgagttgtctaatgattttgatcattagatctggagatcttactttgaaaaacactgcaactgggagagtactgcatttcaggaggatggatgatatagacatgcaggtgattttgtgttaacttagataacagggcttagggaaccaggaaacacacctgggaatgccttaatgtgggttatgcctattctgattaaactatatcctatcataattagtagaagatactttgttttgatgataaagaagggaatgatttttgtttcaacaacagaaatttatttatgatttgaaaagcagcagagagattaggggatagacaagccttttagttgcagactttccaagaagaaaataggctaaaacaatatatgagattctccactatgaattaaactttttcattctttattgtcaattaaaaaataaaacttctatatattttaaaggccataaaccaattatcttagtgtttccttcaatgttctaaaatttagacaggttttatctaattattttatttactctttttactctgcctggattctttacaacattttaactttctattaaagaaagttggttccaatactgttaaggctctgtttattacataatatagcacaatagtgctctaaactccacctttaacatgctcatataattccagtatagaccatgctaatactcataattgtttaatgaccatggttaatcttctgctgcatcctcatagccaggctttccttttcctgaatccatgatgagtttggttggtgtgaagactgtaattgacttttgtccccagagctcacctaatattatattcctaatattattggaatacaaatatgtctatttacatttatatatttataatctatatgttacacattacacatttatatttatttatatgttatatgacatctaattattggaatatatttttattttgtcttttggagaatttgttatggaatcaaacagacttatttttcccatgagatcaataggatatattgtgggacattttctgttacgaatttggcaaataggacccaaagctaggaaccaagattcattaggcatccaccatttttcattaagaatggctcacattttaagcacagctgcacttctcaaaaaatttttttaaataaaaaaattaaaaaaagaatggcccacagttggacattctctgtagaggtaagaagcagcaactgaacaggctctgcaacctccaattctcacctcttagctggtgtgaggaggtagcgagggatgggaggagtcaagaagagaatatcatcagagtattccccctttcccacaagccacttgaggggtcagtactccaaaataattacttccaaagacagagatctgctgcataaaaaggaacattgtgtgacattttcatctttgttctgaagcagattttaatctatgtttacatctacttaagaagaagacgaggaaactggagagagatggtggagtggagagggggcagccatggcctgcctgggtttctgcactgggcatggtgaggaggcacgtgtattctgtgggcaggtgctgcctctgaggtgccagggctgagctgtcccaccagagcttcacccagaggagaaagtaaggggctgtggagggttctcctgagggaggggctgacaggaaggggagacacctcccttgaggagcccctgaggtcccctgggtgctctctcatagggacactcaccatacacagccatcagtggtcggccagggaagcaacaacactagaggtgcacagtggttaagtaagaacagttttgttgtttcttccccttaatcttttcctttcaccttaatcccgggaagttaaaatcaaagaaaaaggaggaaagaagagaacaaagtaggccatgtccacctcactgtagctcgggatcaggcctgaagtttggagagcagaggaaaggtgaagactggagtgttaaacagaactgccctgaggtttatttaaccactgaaagtggcccagaggtttggagctttctttcctagacctcttcaagggcataaggaccagggcccctctgaaggacccaaccatgcttaagcctctttgatgctcttttctttggcatcctttcctctccctatcgctccacccagaaaatgtttatatagactctggtaggcagacttgcattatatctttgtatcatttcctataagtcagtttatgctggattccttaatttgcctataaagctgaaagttttgaaataagatggtaggaaagacttctttatttttggtttccagctatgcctcctttcctgaaagtgataagcagaaaatcacccaactgcctcaatggaggaaaaattgtgaggttaattaaaaataataatataaaaaggcaaccactgttaatattgaaaaatggcttgtcacacatggtgatcattctgaaaccacaaatgaccaaaactggtgaagtcctttctgtaacatcacaggcacgtctaagtgattcttttccatatctgtaaagtaactttacgaaagcaggtgaagacctgcccaggacctgaatgaaagcattcatgtatttagtcacaagagggggctgctgtgtctgtcaataagatgcctgttcagctggggaaagagtgtttggctcacagtcagtagtgaagccgtgcagaaactgtgacaaatgatactctttattctctttgttctaagcagagtagtctgtgcatagcttccaacattcaataattcctggccttgcctcaatccattatgaaaagttttgtttctactcaaaataggacaatatagaaagacagagacaggaagtagttatacagctttcaagttgaattgatcttttttttgtcgtttttgaaatagagaaaagtagatatttttggtggggaagatacttttttttctcaatctatttcatttctcttaaacttgagaagataatgagaaaaagtcttctaggttgctcccttccttcttacagtcccctcctttcttctgtctttcctcttctctgcatttcaattcttagtgtgtgtcaccactaggcacacacatggagaatggggaaaggtgggtcagggatagggtttctggggtgtaaggatgtgtgtgaccccaagtctcttgtttcctttgtaccaagatatgcagtctgtaaatgctctcctagagatagatgatatctagaggcatttcaggcatctggagacatggcttcctgatcaggttctgattatacttttctggtcactttggacacattactgtctgcgtctgagcctcatttcctctttattgttatttagatgggctttctccatcttcttatgatggtataagccttggtagggttttcctgaatataaagaaacttgtgacagagtggactgtactcctgggtaagagtttcaggcctaagaaaagatggtgttctaaaccaagaaatcagaagaggaacctgctgcctgcactgtcttactctccttcacccaagatgctaagggcaaccaatcaaataacagctgttaactttttgaggaggtcacatcctcagtgtgaggggctacatcatacccagtatattagtttgtgccataggctggggacttaaaaatcagaaatttattgtctcatggtctggaggcaatgtctgaagtcaagatgccaacagaatccaggaaaggaggatctgtttcaggcttctctcttcggcttatagatggccatcatatccctgtgtcttcatatcatcttccgtctgtgtatatctgtgtccaaatttctccttttatattgcattagatcccacctcattttacttagatacctctataatcaagaaataatcttgaacccaactccaaataaggtcacattctgaagtacttggcgctaggagttcaacatataaattttagagggacaaattttagcctataaccctcagtgaaagctcacagaagagttttctttgctgtagaatttcctgttttattgagcccaagggaaaatgacagacagatccagggagtcctgcctcttaactagtgagtctacatgaccccagccgtatttggctctttctaggggaagggagtcatacataaaattacttctcagtactataccaggggtcttcaacaagttcatgaaaaatgcatattacaaaaaaattatgcataatttttaaatttttgcatcaaaataaactcctactaacttgttatgacattgtacacagtatctaatttgaggcactaagaaggatgaaagacaaaacagtgtgaaaagagctcctgtcagagcaacgtgaattctgccaatattgaagcaaaaacaagcaccaaatttaaggtaaagcttgggtggaagaatggtgaaatcattgacaagtttatgggggcaattccccaaagaaattagcagtttacaaatgaataactcattttaagaagagacaagatgatgttgaaaatgaagcatgcagcagcagagcatacacattgattgagaggaaaaaattcatcttattcatgccctgattgaagaggactaatgattagcagcagaaaaaatagccaacaccatagacacctcaactggttcagcttacataattctgacttgaaaattaaagttgagcaaacctcccactcagtgggtgccaaaattgttgcacccatatcagctgcagagaaaagcagacatttcaatggaattttaaacaagtgggatcaagatcctaaagcattttttcaaaggattttaacagaaaatgaacacagattcaccagtacaatactgaatacaaagtactgtcaaagcaatgactgccaagaggtggaagtggtccagtcaaagcaaaagtggactggtcaagagcaaaggctgtagcaacaggtttttttgtttgtttgtttgttttttgttttgctcaaggattgttgcttgttgactttctggagagctgaagaatgacaacatctacttattactagagtgttttgagaaagttagccaaggctttagcagaaaaatgcccagaaaaagctcaccagagagttcttcaccacgacaatgttcctgctcattctttgtgagagtttcaatgggaaatcattaggcctccatctcacaatactgactttctttcttctgacttatttttgtttcctaatcttaaaaaaaatctttaatgggcacttactttttcttcaattaatatataaacaaacctgcattgacatggttaaattcctggactctcagttcttagggatggactaaatggctgatatcatcacttaaaaaagtgtcttgaatttgttggagcttatgttgagaaataaagtttatattttttaattgttaccttttaattccatatttctataaactttttgaaacccccttataccttgatctgaaaaatctgccttgatttgagggtctggggataatctcgtttttctcctcagggattatgtgtaatgttaaagccacaaaagtagggcagtgctgaaacaagaagtgaatataccctgttcccactctaccactggaggaaatgaggacacaatctggtatcaacagtttgataaccatggctcacagtatctgattggaggtttaaagaacgaggtgaccagtcaaatggcttcactgcctgtattagtctgttctttcattgctataaagaaatacttgagactgggtaatttgcaaaggaaagaggtttcattggctgttcaggttccgaaggttgtacaggaagcgtgttgttggtatctgtttggcttctggggaggcctcaggaaactctcaatcatggcagaaggtgaaggcagagccagcacttcacatggttggagtaggaggaagagagagaggacggggaaagtgccacacacttttaaatgaccagatctcaaaagaatgcactcaccatcacaagaacagcaccaaagggaaaatttacccccatgatccaaacacctcccaccaggtctgacctccaacattggggattacaatttgaaatgagatttgggtggggacacagatccaaaccatatcactgcccattcctgtggacaataaggctagtaccctggtcctgcaccagataaccctcaaaggcaccaccatgtgttactacactgtgggcagattggaccacatctgtctcccaggtgaagaggggagataaaatccatttaaagagggcattgcccaagaaaatgtgagattaatggaagaaggtagaaaatgaaatgagaagaaggaaaggggaaaaataaggaaaggtacatgaaatcaagaactgcaccagtaaagaaaaaacaaggagagagaagatcctggatattgctctttctccaatctaacattttcattcttggtaaaggtccggtgtcaagttcataaattgagcattatttttctgagaaatatctgggctctctcgattttttcaactatagcacatgcattgaaaagtaaatgaattttgaaaatttgctaacatgaaatcattatatcaatatttttatttcaacatttccctagttttctatgtacctgtattccatttttatgactaatcactttgtaaattaatgtgtaattgtttaagtatctacgcaatatagaataaaaagtgatacttcattgattttcttctgacaagttcctaatcactgttgggtttcatcacacttccactgtttctatacatttaaatacaaactcacagtaaacatacttttaaaaatcgtaaataggatcacactatatataaaatgctgtggttcaattgaataagagacagaagcttttgcaactcagaaagtttaacccaccttatacttttttgcaagtgtagtaagtaactcacaatacagagctaccataatgtattgactatctatattgaaagaatatttaaatttttttccacttttttaaccattgcatgcaatgtacagtgctgtaagtgtatttataagagtatttcttaagaaaaattcctggccaaatggaaattttgcattcagtaatatgtaaataacatatgtagacatttattaattatatttcagctatcagaatatcagagtatccatttcctgacattatcaacaaaactgaatattaatagtatgattctgaactccttttgcaatatgacaagtaagagatgatagaaagggccttttcacaaaaatgcaagttacgggaaaccagtccttaagcactgaagtggcaagaagagacagcagtcagaggaatctggagaaagttgctgtaacagtatggaaaacatttatatattttttcttttctaacataagcatttaagaatatatatttctctctatgcactgatttggctgcattctacaaatctcatattcaaacatttttgtttctttaggagaaggaggaggaggtgaaagtggaggagaaagaagcatttctctagcagtactgtgcttggttctgaagtggcagtgttttcatttctttcattccatttccacctcccacattttgcagatctgtgtgtgtgtgtgagagagagagagagagagaggagagagagaggagagagagagagagagagagagagagagagagagagagacttgtctcagattggctgggccaactctgtgtttcctgtagaaatgtttgaacatatgagagagcaaagcagagtgtttatcttgtgagccattctccatatttcagatataagatttcagttctcagtgagtctaagtgacagaaggaatggagaccctcttgggcctgcttatcctttggctgcagctgcaatgtgagttagagggaaatggaaatgagcaaagagcaggctgactccaggacgtttctcccaggaaagagggagaaagaaagggagttgttatgcctgtatggtttactgggaatttctgtggaaattgaaaaaataaatttaaaggtaatttctaaggaatcattagccactaaccagtctattgctctttttctgaacaggggtgagcagcaaacaggaggtgacgcagattcctgcagctctgagtgtcccagaaggagaaaacttggttctcaactgcagtttcactgatagcgctatttacaacctccagtggtttaggcaggaccctgggaaaggtctcacatctctgttgcttattcagtcaagtcagagagagcaaacaagtggaagacttaatgcctcgctggataaatcatcaggacgtagtactttatacattgcagcttctcagcctggtgactcagccacctacctctgtgctgtgaggcacagtgcacaacaggcacctgcaaccaatacccaaactctatagctggggctctaactgcatgttttatcttgagactgagcaatgtttttgcattaagaggacttctaaattgacactgtctccacacagaagcaatcaaatacacaaaacttgatgtaataatctgaaattaaactatgaattctctgatctttagatttttatcaattttaatataaataatagttttatttcaattaatttacatgccatgaagttcagtcttttaaagtgaacaattaagtgttatttagtgtattcacaatgttgtgcagcttttatctctgtgtagtttcaaaaactttttaacatctcaaaaggaaaccacatgtccattaagcagttaccttgcccaccctcctcccagcctctggcagccaccaacctgttttcagtctctatggattttcctattctgtacatttcatataaatggaataatatagtaggtagtggcctttgtgtatggcttctctcacatggcataattttctgaggtttattcaatgtaggaaggaccagagaaagctaaatatgcacatctaaccaatgacatgcttatatcttccccatgcaagagcctccaaccagggcatacctgaagctttgttagttttcttccactctaaagcttccctactcctctgcctatctttaagtctctgccaaacacaagggacggtagctgattcctttggtataccaagctctgaataaattgcctttgcttttttcatttaggtggtcttcacttatatccacagaactattgtaaagacactgagtttttcttccctgccaagttctcacttcaccataagagtcactttgcacatgaaaaattaatgaatcaccataagaaatgttaaagctggagggcagcttgtcctccattcagataggtcattgaagcctacatcaatcagatagtacttcttagataagtcagagagatgcattgatgtaaagcccagttctcaatatttacgtgtcaaactctgtcctcaataaaagctcgaaactccaaacagatatcttggccttcctggaagattttcttatcaacaagtccttgttctcatttatttcttttactaaatattcaggctccatattgtgtgatgaggagtttgcattcacaacctctgccatatctgggctacaaagctgctttctttcttgacattacaaaccaactcgtgggtaagtaatacattcagatatatgagctataaaggagcttaaatagtgggggacttcaccaccccactgactatgttaggaagatcatcagggcagaaaactaacaaagaaattctggacttagggccgagcgtggtggctcaagcctgtaatctcagcactttgggaggccaaggcgggcggatcatgagatcaggagattgagaccatccttgcaaacatggtgaaaccctgtctctactaaaatacaaaaaaattagccaggcgtggtggtgtgtgcccgtagtcccagctacctgggaggctgaggcaggggaatcacttgaacttgggagacagagattgcagtgagcggagattgcagtgagccgagattgcgccactgcactccatcttggtgacagagttagactccatctcaaaaaaaaaaaagaaaaaaagaaattctgcacttaaacttgaccaattggatctgacagaattttatagaatacttcagtcatcaaccacagaatatatattcttctcattggccataaagcaagcctcaataaatttttttaaaaattgaaattataccaaccatactcttagacaacagtgaaataaaaatggaaatcaatactaaggagatctctcaaaatcacataattacatggaaattaaacaacttgctcatggatgattttagataaaccatgaaattaaagcagacatcaaaaaattatttaaaataaatgaaaacagagacacaacatacaaaaatctctgggatgcagcaaaatcagtgataagaggaaagtttatagtgctaaatgccaacgtcagaaaataagaacgatcttaaattaataatctaacatcatatgtagagaaacaagaaaaaggacaaactaactccaaagctagtaaaagaaaagaaataactaaaatcagagcagaactaaatcaagacacaaaaatccatacaaagcataaataaaaccaaaagttggttctttgaaaaaaaataataaacaagatgtatagactgctagctaaattaactttgaaaaaaataataaacaagatgtatagactgctagctaaattaacaaagaaaaaaagagaagttccagataagcacaatgaaaaatgacaaaggcagcattacaaatgataccacagaaataaaaagatcctcagaaactattataaacacttctatgcacataaactagaaaatctagagaaagtggttgaattcctggaagcacacaatcttccaagattcaatcaagaaaaaaattgaatcagtcattaagaatctagcaaccaaaaaaacctcctgggccagaaggattcacggccaaattgtaccacatggacaaagaagagcttgtaccaatcctgctgaaattattccaaaatattgaggaggacggacaccttcctaactcatgctataaagccagcctcaccctgaaacaaaaacatggtaaagacacaaagaaaaaagaaaactacaggccaatattcctcatgaatctagatgtgaaaattctcaacaaaatactagcaaaccgaaaccagtactacttcaaaaagttaattcaccagaatcaaataggtttcattcttgggatgcaagttttgttcaatatatgcaaatcaataatatgattcaccacataaacataattaaaaacaaaagccataagatcatctcaatagacatggaaaaaacttttgataaaatccaacatcccttcataataaaaacctttaacaaattaggcactgaagaaacatacctcaaattaataacagccatctatgacaaacccacaggcaacatcatattgaacaggtaaaaactgaaaacattcctcttgagaactggaacaggaaaacagtgaccctcttaccactcctagtcaacatagtattggaagtcctagccacagcattcaggcaagagaaaaaataaaagactttgaagtaagaaaaaaggaagtaaaagtatctctctttactgacaatatgattctatgcctagaaaatcctaaagactctgccaaaaactctgccagaagacccctggaactgatcaatctttcacttccttggttagatggattcctgggtatttaatttttttgtggctatggtaaatggtatgagagtgaaagatctctacaaggataactacaaaacactgctgaaagaaatcagagtcaacacaaataaatgaaaagccattccatgctcatgaattgaaagaatcaatattgttaaaatggcaatactgccaaaagcagtctagagattcaaaactatccctatcaaactcccatcattatttttcacatgattagacaaaactattctaaaattcatatggaaccaaaaaagagcccaaattaccaaagcaaaaagaacaaagacagaggcatcacattactcaacttcaaattacactataatgctacagtaaccaaaatgataatggtagcagtacaaaaacagacagatagaccaacggaacagactagagaactgagaaagaaagccatacacctacaatcatctaatcctccacaaagccaaggaaaacaagcaatggggaaaggattccctattcaataaataaacagaattaaaaacaaaagatttacagtaagacctcaaactatcaaaatttcagaataaaacctaggaaatacccttcttgatatcagtcttggcaaaggatttttggcttaagttcccaaaagcaattgcaacaaaaataaaaattgacaagagggatctaaataaggagcttttgcctagcagaagaaactatcaacagagtaaacagacaacctacagaatgtgagataatatttgcacactacacatccaacaaaggtcttatatccagaatctataaggaacttaaacaagtcaataagaacaacacaaataactgcattaaaatatggacaaaggacaagaacagacacttctcaaaagaagatacagccaagtggccgacaaatgtatgaaaacaattctcatcatcgctaatcatcagaggaatgcaaatcaaaaccacgatgagataccatctcacaccagtcagaatggctattattaaaaagtcaaaaaataacagatgctggctaggctatgggaaaaaaggaacacatactctgttgatggggatgtaaattagttcagccactgtgaacagtttgcagagcagtttggaaatttctcaaaaaacttaacttaaaatagatctaccactcaacccagcaatcccattactaggtatatatccaaagaaaaataaatcattataccaaaaagacacatgtactcgcatgttcattgcagtgctattcacaattgcaaggacatggaatcaacctaggtacctgtcaaatgtggattgaataaagaaaatatggcacatatacaccatggaatactatgcagcgacataaaagaatgagctcgtggcatttgcagcaacatggatgcacctagaggccaaatttctaagtgaattagtgcagaaacaggaaaaccaaataccacgttttctcacttgtaagtgggagctaagcattgggtacacaaggacacaaaactgggaacaatagatactggggtttcctgacaagggtaggactgaaaaactacctattggatactatgctcactacctgagtgacaggatcattcataccccatacctcagtgtcacgcaatatacccatgtaacagacttgcacataaaccctcaaacctaaaataaaagttgaaattgtaaaaaaattaaaaataaaattggatatagttatgaaaaagggggcttgactagtgctactttaatagctattatattccataatataaatgaacttctattgttaatgacaattaatgaactacattgcaagaataaatgtgagagttcacatttgaaagaagttgaaagaagttactttctcctgcacatggggtaacagcatcttaggtaggcaaacactttgctgttggcaatatggcagtgaacagttacaatttaacagggaagatgtatacacacaacaaagcaattcaaacaaatatataatttcaatgcatgataaggacaataaattttaaaaatggatatgaaagatgataaaattgtgtttactttggcacggtggggattatgctgctggtggtcagagaaggcctctctgagaaaatagttacattgagatatgtaggaaagattgcaatagcaaagttaaggttcctgctaaaaagagctgcaggcagagagaaccacttgtacgatacagtgaacttaatcaataaatcttttgtgtgtgttctgacttctccaccaagtgaccgtttgcccctctctttctctctctgcaggcctttctatcccctaagacataacaatattgaaaattggctaacagtgacttctaactgttcaagggaaaggaagagtcgcatatttctcacattatttatttttctttttgtggagatggggtctcactatgttgcccaggctggtctcaaactcctgggctcaagcaattctcctgcctttgcctcccaaacagctgggattataggtatgaaccaccacgatgggactctcattttaagtcaaaagctagaaatgattaagcttagtgagaaaagcatgtcaaaagcccaatcaataagctgacagatagacctcttgaactaaacagccaagttgtgaatgcaaaggaaaatttattgaagaaaattaaaagtgctactccagttaaacacataaatgataagaaagtaaaacagccttactgctgatatggcaaaagttttagtgttctggataaaatatcaaaccagttacaatattcccttaagccaaagcctaacgcacagcaaggccctaactctcttcaattctgtgaagcctgatagaggtgaggaagctgccaaaggaaagtttgaagctacaagaggttgtttcctgaggtttaagaaatgaagtcatcatcatgacataaaagtgcaaggcgaagcaggaagtgctgatgtagaagctgcagcgagtttccagaagatctaactaagaccactgatgaaggtggctacactaaacaacagattttcattgtagacaaaacagctttctattggaagaagatgccacgtaggactttcatagctagagagaggaagtcaatgcctgacttcaaaacttcaaaggacaggctgattctcttgttaggtgctaatgcagctgatgactttaagttaaagccaatgctcatttaccattctgaaaattctagggcccttaagaattatgctaagtgtactctgcctgtgctctataaatggaacaacaaaacctggatgacagcacatctgtttatagcatgttttactgaatattttaagcccaatgttgagatctactgctcaggaaaaaaaaggttcctttcaaaatagtactgctgattaacaatgcacttggtcacccaagagttctgatggagatgtacaaggggattaatgttttcttgcctgtgaatgtaacatccattctgcagcccatggatcaaggaataattttggctttcaagtcttactatttaagaaatacattttacaaggccataactgccatagatagtaattcctctgatggtctcagcaaagtaaattgaaaatcttctacatgataccattaagaacatttgtaactcatggaagtaggtcaaaatatcaagattaacaagattttggaagaaagtgattccaacactcgatgactttgaaaggttcaagacttcagtggagtaagtaactgcaggagtaaatactttagtggaataagtaactgagataattttgaaatgatattgatggttcttgtatattttaactatctaggacactgctgtagaaagcttttaagaatgggagggaaatcatgggtttggcatggttaagttgttttctttcctggaggcagtaaacgagttgaaaggctcttgaggtgccctctggagctcagaatttttaaatgccagttttaaaagatccaaatgattatcaaaatatagtggtagatagcaggagaactagaattagaagtggaacctgaagatgtgattgaattgcttcaatctcatgataaaactaacaaataaggagtttctttttatgggtgagcaaacaaagtagtttcttgagatggaatctattcctggtgaagatgctgtgaacatcgttaagataacaacaaaggatttagaatattttataaacttagttgataaacccatagcagggttttagaggcttgacacagattttgaaagaagttctactatgggtaaaatgccatcaaacagtattgcaggttacagagaaatctttcatgaaaggaagtattaattgacgcagcaaactgcattgttgtcttattttaagaaattgctatagtcaccccaaccttcagcaatcacatcctgatcagtcagcatccatcaacatcaaggcaagaccctccaccaacaaaaagattatgacttgctgaagaatcagatgatcgttagcattttttagtaataaagtacattttaattaatgtatgtacattgtttttcacagtgctattattgtccacttaatagactacggtgtagtgtaaacatagtttttataagcactgagaaaccaaaaagtttgcatgactcaccttattatggtggtctataatcagcaatatttcagaggtatgactgtatttgactttgccatcaactcaatgacttacactccagaaattgttattagcagaagcataccaaaggtcaggcaatgggagtggtttgtcccagttgcaggtaataacagggtgctttatagagagctttttaaaaacaatataaaaatgattaatagccaatctgatttttattaccgtatgccaggaattctaaacaatgtcaatgataaaaaatattttttgacctaagttctaaacaaatgcagaggttactatttattttaataataaatgtatgcttcaaattatcacatttttatttcttatcatgtaataaacagttttctacatggaagttattttggagaattctcagttttgcagctgtcttcaacacacatggattgtaatacagcgattttccatgtaccttttatccagtttcctctaataatatattatctttgatatgttgtatatatatcaaaacaatgatataattacagccagaatatggatgtcgatatagtcaagatacagaacatttccatctctacaagcatcctcatgtttcccttttattagcaatagcaacttccattatgccaccatctactatttaacccctggcaaccactaatttgttctccatttccataattttatcaagaatgctatataaatggaatcattcaggatatttatgaacatgaatatttttcactctgcataattatctggagattcatacaggtcgttgtatatattaatgtttcattccttttcattgctgagtagaatttcatagcatggatatgccagtttgtgtaaacattcacttaatgaaggacatttgggttgtttccagttttgagctattatgattaaagcttctataagtgttcatgttcaggtttttgtatgaaggtgagtcttcgtactctggaatatataccaagtagtacaattactgagacatggagtaagtgtatgtttagttttataagaaatcgccaaagtattttctaggttgctgtactgtcttgcattcccaccagcagtgtttgagtaatctaatttctccacatttctgctagcattttgtgttgtcattggttaatacttcagcaactctaagaggtatggagaaatcattgtagttttactttgcatatttctaatagccagtgatgttaaacatttttggtttttctttcttttttaaattaactaaagcccacactttattcctatttcctttgtttttgccaaatgtcctttttatgtctgcagggtctgtaataacactccctgtttcattcctaatattagtaatttgccttttttttctttgttttactacaagtttgtcagttttacccatctttttaaaaacggctgtttaatttttgtttctgttttcagttctattgatttctgcttttatcttgattaattccttccttaaatttgctttggattaattttttccttctttttcttggttcttgaggtgggaacttagatttttgtttggatacttttttcatttttaatatttgcatttagggatatacattttctctcaatgctgctttgactatgtcctacaaattttggcatgttgtattttcatttccactcggttcagtgtatgattgatttcccttgagcttctttgatccttggattattaggatgtatgttgtttaattttcaaatatttggagatttttctgctctctttctgatatttacttatagttgtattctattgtggttataaaacatagtctttattgtttcaattcttttacatttaattttttgaggtttgtcttgtggcctaagatatggcatacttggtatacgttctacaggcatttgaaaagattgtttattctgccattggtaggtgccatgttctagaaatggctattagatcctgttggctagcagagttgttgagttcgtctatgtccttgctaattttctggcaagctcttctattagttattgagagtggggtgttgaagtttccaactataattctagaatcatcggtttcttctttcattactatgagtttttcttccatgtatttttcagctcttttggttggtgtatacacatttagcattgctattccttcttgaaagactgaccctttcaacaatatataatgttcctttctgtctcttctgtctctggtactttgctttgctcagaagtctactttacctgatatcgatataattattttgactttcctttgattaatgtttgcacgatatatattttactttctttctttctttcttttttttttttttttttgagacggagtcttgctcagtcgcccaggctggagtgcagtggcgcaatcttggctcactgcaggctccgcctcccgggttcacgccattttcctgcctcagcctcccaagtagctgggactacaggcgtccgcgaccacgcccggctaattttttgtatttttagtagagacggggtttcaccgtgttagctaggatggtctcaatctcctaacctcatgatccaccagccttggcctcccaaagtgatgggattacaggcgtgagccaccgcacctggcctatattttactttcaacatgcctatgtcattaagttagaaatgaggtcttcgtagacagctgtagttggatcatatttccactcttttcactttctctgtattttaactctcttttcattgctgtttgtagaccaatctctgtatcttaattggtatatgtacatcatttgcatttaatgtaatgtatattttagtgattaatcttccatttaattttgtttgttctgttttttgtttccctgtgttttatctcctaacttcttgtgaattatttgacattttctaaaattccattcaatttacctataatgccttggatgtgtatttttgtgtagctttcttcagtgtttgctctaatggctattataaatagataacacagttgtctattggtgatgtcattccaccaatttaaatgaagtataaaaacattgtctccctttacattcagttgtcctcaccaattcatgatacagttttctttatgttttccccaatatatatttagaacctcatcagacagtgttattatttttgcttgatccatcaaccataactgtgaattaaaaaaattgatcaaacatgtttggagtaaagacttcattatcttattttctctatataggaaatattacaaatttattgtcatatgaagtcaattaagaagtatggaaccaaaaaatataaaaacaaaaaatcttaattctggcaaggacgtggagaaaagggaactcttgtacactgttagtaggagtgtaaattagtataaccactatggagaacagtatggagtttcctcaaaaaactaaaacctgagctaccataagatccagcaattccactgctgggtatatatccagaagaaaggaaatcagtatattgaagaggtatccgcactcctgtttgttgcagcactgtttacaacagctaagatttggaagcaatctaagtgtccatcaatacatgaatgaataaataaaatgtggtacatatacacaatggagtattattcagccataaaaaacaatgagatcctgtcatttgcaagaacatagacagaattggagctcattatgttaagtgacataagccaggcacagaaagacaaacattgcatgttctcatttatttgtgggatctgaaaatcaaaacaattgaactcatggacatagagagtagaaggatggttaccagaggctgggaagagtagtgagggaatgaggggggaggtggggatggttaatgagtacaaaaatatagaaagaatgagtaagacctactatttgatagcacaacagggtgactatagtcaaaagtaatttaattgtgaattttgaaataatgtacagttaaactaagagtgtaattggattgtttgtaacacaaaggacaagtgcttaaggagatgaataccccattctccatgatgtgattatttcacattgcatgcctgtatcaaaacgactcgtgtacccctaaaatatatacaactactatgtacccacaaaaattgaaaatttaaaaataaagtattatagaagtgtgtcagataaacaaggaaatatgtaaatttctgaattctgtatttatggtattcgtgttttaaaatttatagtttgttgtgattttctgacctaaaattatttttgtacccagttttattcttatttttatgttattctttttaaaatcctccatcttgtaagtttcaggcttacaaacataaatcctcctttgtacattatcataaatctttgaaattcaacactagaagggcaggaaggatgtggaggaagttcacaaaaattgtgaatttctcttagccctctatttggcccctggagggtgttgttgcctaaattggaaatggcttttctttaaaagattagaataagctccttccttctctacaggttaaagaggtgtcctttctgactgagcattcttttagacagcgatgtataaagaatctcagacaccagaggcaggcaagtttgtcaagagagcatctcttactagcagtttctacaagatccctaagaagaagaaatctaaatccctgccatttctccttagtttcaacctggattcaagttaccccgtggtcagattgtgtctgtggggaatctcctggaaaggtgcatgctgctccctcagtgcttggctagatctcattgtgtgtcttgacgcttggggtactcctgttcccaagtgggtatcattccattttactctcttgtccacaaatggagcattgtctatttgactctgaatacggactttttgtgttagctgagttcactgacatagcattggcattgtaggaaaaaccactgcccattctgtgactcagcctgacgttcatgtcgctgtctctgaaggagcccctctggagctgaggtgtaactattattgatcttctgttccaacatatattttctgatatgtgcaatacctcagccaaggactccagcttctcctgaagtacctatcaggatatagggttctttcaggaattaacggttttgaggctgaatttaagaagaatgaaaactgcttcctcctgaggaaaccctcagcctattggaacgacacgctgagtacttctgtgctgagtcccgcattgcccaggactgtagtgggggctacataaaaactacctgagacacatagcttaaacaactaaggatctcagcctcagttattttcaggaagttgacgtgttctgtgaaagcaaacagtacaaagaaagtagaatcctgtctagcatttagttcctatggacatcttagatttctttaatttattttcttatttgccattttgcaaaggaaagagcttgtacctgattctagaagaaattagactataggatttgtaacaagcaggaggaggtgatttgcaccaaggtatttcagatagtgatggactgggatgacttaaggttggccatgtggattggtataaggcaaatcaatttgcttttagttattaatctcatctctcaaacaatcagaaacccagaatgagtgtttatttcaagctgcattatctacagattattttacccagtatcctgacttcagtgagctacagtcctttgaggaaagaagcctcttcaaaggacttcagctcactgatgaaagtatttgagactgggagacttaattaaagctgacatttaaggatgtgtgcaaggcaatctttccaaagacaatataaaagggaaaaaaaaggctttatttttttaatctggtggtccccagcgaaaggcagtctaaattaaacacaacatcatggcagagttccatgtggaatcttggggttggttgttctatggatgacctaccctttatcagttctacccagattacctctctctgtttttctccctttcaattcaatttccctaatacttgctgagtgtccaataactattgttgattccttaaccatatttaattatttctctacaccattcctcatagtgccaatagtaactatttgcaacgttcttgagcagttaatccaatgttgtgcctgcagaacttttatttctacttcagtaaaaatataggtgttcttatttttcaccccctttacctccaaatccatttccagattattattatttatggagtctggggcaaaagcaaaaacaaattattttcataacttttaaaaacagctaattttcttttaaaccattagaataatctagtaaacctaaaaagcaaaatataaataataattaacaatgaatagctttaataaaatatatttaaataaaattagaatttatttgtttttaagtttaattcgatcacagtatttaaaataaatgctagtttcaacattcatctagtatataaagaagctaatcagtgtcactctttatgcagattcaatctaggataaaatatatgcaatttaaaactaatgttgttgaatattacaaagtgttccagccatcatgagcaactatagtgaatactatgctgattcatgagtaccctgaagaaccacaaatgagtacataagagatgcaagaaaatagatcctcagcaccctcgggaaacagtatttctttttgtaagaatctattgcctccgtgctgagaggaaagatggggctagctaattaattttttccttcccttccttgaaacccctccacccttggccccaattccaaatcagagtcatatgaagtcaattaagaagtatggaaccaaaaaatataaaaacaaaaagtgttaatgctggcaaggacatggacaaaagggaacccttgtacactgttggtaggagtgtaaattagtatagccactatgaagaacagtatggaggttcttccaaaacctaaaacctgagctactataagatcatatttacttatttttctacaccattcctcacagtgccaatagtaactatttggaacgttcttgagcagttaatccaatgttgtgcctgcagaactttaatttctacttcagtgaaaatataggtgttctcatttttcatcccctttacctccaaatccatctacagataattattattattgatggagtctgggggaaaagcataaacaaattattttcgtataaacagagtctgcctcctatggcagcagtggcacaacccacaaatatttctaatatttgaaaaggacaaaggtcaaggtatgtgaagaagtatttttctcaaatctgaaaaattgtgttagtggttttttaggttacagattgtgcccggtcctgagtgacagagacagtccgtgttcttcagtacatttgcgtgtgtgtgtgtgtctgtgtgattgagtggccctgtaaaatatgaggctctgggcagggctcttgcctgagtctaagggtcatactgtccacaaccttgctcatcttctgtccttcttgtatttaaaacaaagggtcacttttcaaagtttgccatctttgcttttgttactctccagtctcgtcacctccacagaaggcatgtagcatcacatcccccatcaagtcacatcctgtaatagaagtttgacataattgttactgtcttggtgctcatgtggtgtttaaggatgctttttaaaaatgatatcctgtaaacctttattacattcagagagatgtttgtctcctcactatatcacaagctctctgaaggaaaaaccgtatccaattcatttttttttttaatttccaaggtctcaaacactcttaaatatattgacttaactataactgaatcaaattggtgagctcatattttttcagttcatacgtatgaattaaatggatgttctaattacataaaattacatttaaagtatttatcttcataaaagccaccgtggggtctcatggccctatttatggtactctccattctgtggacacttctgttgtttcatgtcaacccacaggtacagccctaggaaaagacagctgggctgagctgtccatatatgctgaggaagatgtagtctttctcaaggtttagcacgtcaggaggcatataggcttctcttaaattgagggacggctctgaaggatctagtagtgaatagttgttgaaagatttgagaaatatattgagtataaggatgagggccagtaagagtaaagagggaagaataattatgtgcaaggacaaactaaatcattatcagcacataagaaacatatttttgctgagtattcttttcaattgtagctctgtcctctaaaacaagataaatgacatatgaatattcaagttctaggttatatttgaaatgcatatatatatacctatatttaaatttttgtctttatattattatctttatctgtatctatcagaaaatcctggatcaaacagaatcatatacagcaaaagggaaagtggagaattccaaagaagggaattcggattttaaaaaatttttatttcctaagatttcctaagaaaaaaatatgaacttttatttcacaggtccaaaattatttctaaactgttgaaagccatcttttctttagtattcttctgtccctttcatgtaactagaaccccctaccctcaaccaaaaataaataaataaatagataaataaataagtaaataaataaaagagagagagagaaaaggaagaacatggaaacagaaggtaatgataggagaaagtggaaggaaaaaaggaagacagaaaaaaaaagaaaaaagatttactggactgtaagataagctataaaggaagtttgtataaaataagaattagaaaaataaaacatattgcccatccagggtaatacgtagaaaaaaatttgaattgatcttattttttctctcacaatttacagtcttactagggtcatttcttataacaatatttaccacaattcttgattatttcagaggagtcctaatccacacttttcatatattctaataataaaaattattacatatataatacataacatgtatgttcttattactttacatgactggaatgactttcacctaaattggctaataaagaccttcttgtcagaacacattcttgttttgggggtttaaaatgtggacactcattctgtgatcctctccaggctcgaattagtattacagttgaggcacgttgtcctcccgaggaggcccctccctttccttctcacaggatctttcacattctttactatatccagaattattagaaaacatccctcaggttacggaataatgacctttctttttcccttccactccacccctttccaccccggctctcagccaggtttaagtcggcgggtggggcttcctgtcacagaacgctgtttaaaaactcagtagcatctgggcgtgagcaggctttgtcgggtggagctgattggttgcaggagcagcaacagttccagagccaagtcatgacaccgacctccccaaggtttagttaaatatatcttatggtgaaaatgcccggagcaagaaggcaaagcatcatgaagaggatattgggagctctgctggggctcttgagtgcccaggtttgctgtgagttggggctgtccaaggtgggaatctgaaaggatttagcagctgcagccttgttgaggggaggaagggcaaggagttaaaaagtcatgcagtctttctattcacacaacctgtgggggcattttcaggattcttcagatgttaaactgcccatcacctatgactttttctccatttctgaccaggtgtgagaggaatacaagtggagcagagtcctccagacctgattctccaggagggagccaattccacgctgcggtgcaatttttctgactctgtgaacaatttgcagtggtttcatcaaaacccttggggacagctcatcaacctgttttacattccctcagggacaaaacagaatggaagattaagcgccacgactgtcgctacggaacgctacagcttattgtacatttcctcttcccagaccacagactcaggcgtttatttctgtgctgtggagccacagtgctccccaggcacctgcggcctgtacacaaaccctcatccgggctcggttcctctaccagtaacaaccacatcacgaggccaccgcagcagcattttgcacagcttaatattccttttgtacataggtagagttttaaccgtagattctttttggctctacaggtttgagactttggtctttattttcccttttcaatacacacctcctcctaccctataaatatctaacttggaaggagtagagtagctgataagaggacagaatcaaaataaatatttaagtgacagtatgcaggactccaaaagggtaaaaagtaaaaagaataaaaagaaaagaaacaccattccaataagcatgttgttagacattagttagacagtgatccagcttagttgtgtgtctcaagcacattcaggtctacctcaccacattatgtaccaacagacaagggcaaatatttgcatactatcccactagtgcagcaaagtaaaatttctttaaatattcacatattgataaatagctgtggagaaaaaactttaaaatgttatgttcccatatgtgtttttcaggcttgttgtataacctagaatatgatctatcctggaaaatataaccatgcatgattgagaagaatgtgtaatctgatcttgggtagatagatgtctgttaggtctacctggcttttgtgttgttcaagtcttctatttccttgttggtattctatttgtcctatctattattgaaagtgaggtattgagtcttcacctgttattcttgaattttctgtttttcccttcaattctgtcagtttttgtgcatcatgtattttgggatatgtcattaggtgcatatatgtttataactgatatattcttaatggatgcccttttatcattataaaatttccctttttatctctagtaacattttttggtttaaagtatactttgtctaataataatgtagtgactccagtcatatcttttcctatccttttactttcaacttatttgtatctttgtatctaaagtgtgtctctgacagtgtatagttgtgtgtgtgtgtgtgtgtgtgtgtgtgtgtagccattctgataatctctactttttgattggattgtttaatccattaacatttaatgttatcattgatatagattatatctggcattttaattttattttctttctgtcttatgtcttttttgttcctctgtacctccttaactgctttcctttgcattaggtgaatattttatagtataatattttcattcctttatttttttcactatgctttttcaattattttcttggtggatgttttagtacttacaatatatatacatctaaacttgtcagaattcacttcagactttatgctaacttaactccaatgggattttcagatgtcacttctatataggtctatttcttattccctttattattgttattcacattatatgtatatatgttacaaacaataggttattataatttttatataattttataattatttctttatataatcttatgttttataagctgagaaggaaaaaaggaaagcaaatatatattgaagtgtttgttgttaaccttcttacttatcatttctgggtctcttcatttgttcctgtgcacttaatcatagccaaaaggtcaagaagtgatcatttgttcctgtggattcaagttgccatctggtgtcactgtcttactccaatatagttttgcaatctgccttcctcctttattcttttattatcaaatatgttacattcctgtaagtccaataatataattatatatgtattgttttatacagtagttatttaaatcagttaatagtagaaaggggataaatatgcagtcacactatctttttagtaagtgtgtggatgcaaattactgtttgaagtcccttgctcccagcctgaagatcttcctttattattgcttgaaggtgagtctgcttgcaataaattctctcagtttgtatttatctaggaatgtctttattttaccttcatgtctgaaagatacttttgctgaatataggatcttcattgatggtatatttctttcagcactttgaatatatcttcccactgccttctagctctgttgtttttgttgagaagtcagctgttaattttattgagtttctctcataaatatttgattttctctttctactttgaagattctatttgtcttttaacatttttgctatgatgtgtctgagtgtggatctctttgcattcattttacttagagttcactgagcttcttagatgagtagattaatgcttttttgaatctgggaattctcagccattgtttcttcaaatttttttgttcctttttcttcctttcctttttctggtactctcactatgcgtatattggtgtgcttaatgatgtaccacgtttctctgagtccctgtttatttttctttattcttttttctgtctgtttttcagattgcataatctctgtagatgtatctttaagttcactgattccttgttcagggagcccgaacctactgtttgaccctccagtcaatttttttatttggttattgcactttcccaactctagaatttctattttgttcctttcataaaaaaataatttttaccactttatagatattctctggctgataagaagtcatcatcatatcttttttacttccctcagcatggttttatttctttgagcatacttaaaacagctattttgaaatttttgtctgtgaaatccaacatctaagtcatagaaaaggaagttgccattacccaatttatttctcttgtgtaagaatcacactttcctgtttggggtatatcttataattttttgttttaaactagacattttagataacatattatattagttttctatggctgctcttatgggttgaattgtgtttctcaaaattcaagatgaaatcctaactcccagtacctcagaatgtgaccttatttgaaaatagggtcattgcagatgtaattagttaagataaagtcataagaatggaccctaattgtgatggttaatgttaggtgttatgttgattggactgaaggatgcctggataactggtagagcattgtttctgggtgtgtctgtgatggtgttgccagaggagattgacatttcagtcagtgaactgggagaggaagacccacactctttgtgggtgggcaccatccaataggctgcgcagctacaacaaagcaggtgaaagaaggtgggaggcttctggctgcctactttctcccatactggaggcttccttctgcttctcttgtccttgcgttcctggaccaaactgaggtttgggctgctatttttttacagacaaataacgagatgcagatgaactggggaggaagagagtttttatttctgtagtcagttacagggacatggcccggaaattattgccagactaactcaaaattacaaagttttttcagagttttatataccttctaagttatatgtctacatgtaagtgtgcattcatttaaagacataaatgattaacttcttttaatttataactaaggtctgagtcctgaagaccttcttctagagtctcagtaagtttatttaacctaaatgggtttaggtgctggggtgattagccttatctggtcttctgccaaatcacagaggtttggggagttccttcagacctccaataaatgtgtttgtggaggcctagcgagtttcttcagaccccctataaaacttgtttaatcctaaagaggccctgttaagaattactcctttattttgtcatgcttaaaagcccaggaaagtcccaggcaaaactcttggtgggcttttgctacattccagcctttgtataagggcactggcttttaatatttatcttaaccactcagtcagtaccgaaacagttgttatggagtcctgccacacttggacatcagactccaggttctttggcctgtggactctgggacttgcaccagtggcttgcaggtggctctcatgcccttggccgtagacagaatgcttcactgctggcttctttggtttgaggctttcgagcttggactgaaccactaccagcttctcttttccccagcttgcagatggcctatcatgggacttggccttgtaactgtgtgagccaattctccataataaataaataaataaataaagtttattagggagaattggcacacacaattacaaggccaggttttatatatatatatgtgtgtgtgtgtgtgtgtgtgtgtgtgtgtatgtacatacatgtatacacacacatacacacacacacacacatacacatatatcctattagttctggagaaccctgaccaatacactaatctaatatgactggtgtcctcataaaaagtgaaagtttggaaacacacacacacagagggagaataccatttaaagatgaaggcagagatcagggtggtactccaacaagccaaagaatgctaaagattgccagaaaaccacgagaagctgggcaagaggaatggagtagattctcgtagccctcacagggagtctctcagacttccattctccagaaatgtgaaacagtaagttcctattgtttaagtcacctagcttgtggtactttgttatagctctagcaaactaataaagctgctataacaaattactgcaaatttggtagcttaaaaccaaacaaatttattctgttacagttctggaagcaagaatctgaaaccagttttacagggctacagtcaaagtgttggcagggctgatttcttctggaggctctcagggagaatctgcttcctggccttttccagcttctgctgtccacctgaattcatggctcatgctcttttttgaatcactctaaacttttgcttccatcatcacatctcctttctcttctggagccacatcttcccctgtttccctcttataagagcacttgtgattatatttagggtccactcaaataatccaaaatatttttcccatctcaagatccttaataatgtattcaaagacatttttgccatataaggtaccatttgcaggtaccaggcattagggcttggttatctttggggatgataatccaggctatcacatatagtgactctggatattgtgtctctaccccatccagggcttgttgttatttgcttgtttatttattgtaacaactttacttgactatttcagttaagtccattttcctgcagggtgcagcctatgatgttattcctcagaggacagtctttggtatgtgcacagacatcttgatatgacggtggtttcagcagtgttttctttaactgtctttcttcctgatttttctgttaaactacctgcatctgtttgtatcacacttagccatgagcctccacacttatccatagtctggttcaattaaattcaggcccctttgcagaggtaatctttgaggtcaatctttgaagcttcttataacctcaggaggactcttcccagctgtctttattcccggttctctctattagatttttagctagtcatctgtggtttagtttgttgctctcgtggagctaccagcctcctcttaattgcttaccacaaaaatcttcattcatttccactgtacccttaaggcttggacttcctgaagctctgttccaaatagagtcttcctagtggagagctctctgttcttataactcctcctctccctgggcacaacttctgtgcccctgctctggagcaatgtgagaagagacattgcttttctttcctcagagtgataaccctactttaggagcaaggtgcttgatgggggcagtatcccatggtcttcttgtttgcctcccccggtatgaaacctccaccttatgagcaagctggggtgagggaaataaggacccagtattcttggtctgccatgccagggtagagcttctgccctaacagtaggtgctaggaagtgaaaaggagccctaggcctttcagcttccctggcccagaataggacttctgcaatacaaaattgaggaagatgagaattgttggcagactgtccctcccaggcagatatcgtagctcaacactggaatctgagggaagaaggagccctgtattcttggttgctcccacccgaagtagagtttctattatgctgagctctgtgtggtgggggaagtagtagtcatggctcaaattccaaggattttgttcttatggtgatttagtaaattttcctgaatagataattctccatttgctatatacccaggacaatttccagagacttaagtttttaaaataatttttaccaattaatagtgttttgttactaattagggagagtaaccatgaacctcctcatattgcaattctgaaagtcacagcctcccattcatgatgttatcacatagaacaggcctaaacagaagataatcagaagttcaacttttctttgactttctccattgagaaataaaggtgaagctgccatcttgttttgatcctaaacctgccacagagataattattcaaacacgtcatgtatcaccatcataaaataagcatgtattctgagagtattaaagatgaaaaacaggaacactatattttcttaaatcatagtttttgtaggaaggatggagtgaggtagaataaacaagtctaggattgcctagtttgaataatttcggtgggctctgaggccaggactatccctagttgcctggtacctggccatgggatgcttagggcagggggaatagtggatggagtgtaggagcctagtgacagcctgataaaggaggtgcttggagtatgggctctatatcggttggtttgcatttgaaagatgtgctcccaagtgagtctttactatctctaggaattagccagagatggttaaggcccttagatgtcaaaacatttgggtaaaaagatgtggttgatacaccaacactgttggaatatgagacttctctatgcctcactttcctttggatactcttgttcattcatattttttctttacttaaagttaggtactctgactttgcctattatgttccttttatgattaataataacttgcctaagtctagtctttactagagacaacaatcatcaacttaattcactcaactctccaaagctaatgttattacagccaatttgaaaagtgataaaagggtatggtacactaacactaccaatagtgatagtctttgtaggcaatccataggtgaaaaaagtccttacattacaaaaagtataacatatgatggtcattatttgtcaagaatgaattccatttgagttccattcaaaatggaattttcatttcatacctacagctactgggaactgttttctgtttgggaatcagtctcttcatggccaaaacagagccaaggccaatccttctgtaggtctattcattaggctattttaagggcatgacccccaacaatcctcagtggagcacattattttacaaaaatcataaagcaacgaaaatctttctgaagaaaaactcctgagggtagtgacaccatccatatcattaaacaatttgcagtggttatcaaaaagtattttctcacattagctaatacaataaatatagtagtatatccaaaatcttggaatcacagcaagccagttaaaatttcttaatccaaaggcctatgtgtagtagaatagtcacatatttttgtggggccaatcaggaagtgatctttgtcattgctaatacttcatgttgactctacgttaatactgaagatgagtaaaaacacttttagcatagatagatgatagatagatagataggtagatagatagatagatagacagacagataggtagatagatacatagatgagacatagataaaaagcaacctagttgtgtaagatagactcagaaaatcatttggactttttttttttaatcaagtctgggaaatcttggatcatggttgcaaaatatcttaccctttttataatatttaatacttcagatttgttcatttgttgcatggctctgttggtattctaaatatcactgtccccacaaatggttgaacaagtaatccaaagacaaaaattcaataaaagtcatgcttttaaatatacaaactaaaaatcaaatctctacaggccaaaactctttgtcaagaaaatcgacaatagtggagaagacctggacagttcttgaacatcttttctgcagctttggctgcataaggaccaaaaggggatggggggtggggagaggggaggaaaataaaattattcccatagatttaggaaaagatagattgttacacagccataataagtagccaccagaaccagttttatacctgttcaactgattaacaactcgtctcaatgaacatgcttttgcaagccaactaatcaatgtcagctcctggcttctgaaagtcagccagtcagtgcccctgagtgccaagcaatcagcaatagcctcaccctagtgactctgtttctgcagataatgttaactcatttacacctctgaagtttgccaatccctgaattccatgcttccccaaaacccagtataaatcagctgtctgttgtgctcagcaagattgtgtctgattttcataggtctcctttgctattatttccaataaatgcacatggtctttgtatttcacacattgagtagtgtcaaatccttcgacagctgccaaagtatattttcttgtgggacatttggacttggacaacttttcttactatttttcttcaatgctcaaaacaaacctaacataaaggatatttattcttgtttgaaatgatattcagcatcagcagaaatagttaacatgctatcagaacttataaaatcaacatttagtattataagaaaatgaatctctctgcagatcattccagccagaatagtgatgtttattgctttgtacatcattgaagtcactgattccaaaatcagctatttcaaagcagttgtggattacatttagggtgattgtgtcccacatagcatagcaacaagattcttcactgctatcaaaaatattccattaaaaaatctatactagaaatatttcttcttattttacataatatactaagtgcataaaacttttaggtaattaattatgccttcatctaaaaaccgcatatatattatggtactagaggacaaaaaaagatattgcaaatactgaaataagtccccagttcctttgggcagcacgtttatcaaaacagattttatctattttggcaagctattctcctctctaattgtaggaaccatctcccaaacaatcttccaacatcagtggatttaactttaaatatacatataggagatatgtgtatatataggggattttcaaatttttctacaaatggtcttacttattagtctcagcattgtagcacagtcagacttcctcttaatgaatgtatatatgtacatatgtatgcataatatatgtctgtgtatatatttttccttgagaaaaatgcttttcaccaagaactaacatctggcttggctgaagattatagaagagccccatcttataattattaattatgcccatatgcacatgcttatcctgaatagatctgctgatttcaagccaaatattagtagccaaaagagtttctgcagatgctgtatattttagagtaatggcataatgttctgacaatgccagcaattgacctatatctccattcaaaatgtaattgtattaatcttttatttagaaaaatgattcagatctaatttttttcactctagattagtaaagcaatctaagaatttcgttttataaattaaccttttgtttcccctctcattctttttaccttccttggcaggctgtttttctattctgttctggtttttaagatacatacatacacacacacacacacacacacacacacacacacacacacagatgtaccttggagataatgtaggtagggttccagatcaccatagtaaagtgaatatcacaataaagtaaggcatatattttttttagtttcctggcacacataaaggtttaaagtatactgcagtctgttaaatatgcaatagcattatgtataaaagtgtacatacctcgacttaaaaatgctttattgctaacaaatgctaattatcatctcaggcttcagaaagttgttacttgttttgcaaatgtagggtcttgcctcaatgttggtggctgatcagggtggtggttgctaaaagttgaaatgtctgtggcaatttcttacaataagataaaaatgaagtttgccacatcaattgactcttactttcatgaaaggtttccctgtagcatgcaacactgtttgatagcattttactcaaagtagaacttttttcaaaattggagtcaggataaaaagaaggaggttaatggttacagaaatacagttagaagaaacaaattctactatttgatagtacagtagggaaattatggttaacaataatttactgtatatttcaaaataactagaagaagagaattgtaatgttccccaaaacaaagaaaagaaaaatgtttcaaatagtggatatcccaataaccctgatttgatcattgtacattgtatacatgtatcaaaatatcacaaatgccccaaaatacatacaactataataaattgatttcaaaatctttattttttttttttgagacggagtttcgttcttgttgcccaggctggagggcaatggtacaatttcggctcacagcagcctccgcctcctgggttcagccgcctgggttcaagcgattctcctgcctcaggctcccgagtagctgagtttacaggcatgtgccaccacgcccagctaattttgtatttttagtagagacggggtttctccatgttggtcaggctgatctggaactccagacctcaggtgatccgcccacctcagcctcccaaagtgctaggattacaggcgtgagccactgcgcccagcctaatttcaaaatctttttaaaactactaagaaaatttttaaaaaaatggaagttaatcatctcaaatcctgccactgctttatcaactaagtttatgtaataatctaaatcctttgttgtcatttcaataatgtttacagcatcttcaccagaagtagattccatcttaagaaagcaatttctgtgcttatccataaaaagcaatttatcatttgttaaagttttatcatgagattgtagcaattcagtcacatcttcaggctccacttctaattctagttctcctactatttttaacacatctgcagttactttctccactaaagtcttgaacttcttgaagtcatacatttggattggaatcatcttcttccaaattctgacaacattgatattttgacctcctcttatgaatcatgaatattcttaatgtcatctagagtatgaatcctttccagaagcttttcaatttactttgcccagatccattaaaatacaagcacgttttattttattgcatctatttcttgaaaacttttttaacccattgaattgtcttgaaaattaattgaatatgaatttgtgaatctatttctattttgtttctttgatctacaaattttattttcacaaataccaaactgttttgattactgttctttataatgtcttgagatcaggcagggtgagtccttcaattgtgttccctttaaaaattgttttagtggccgggcgcggtggctcacgcctgtaatcccagcactttgtaaggccgaggcgggcggatcacgaggtcaggagatcgagaccatcctggctaacgcggtgaaaccccgtctctactaaaaaatacaaaaaattagccgggcgtggtggcgggcgcctgtagtcccagctactcgggaggctgaggcaggagaatggcgtgaacccaggaggcggagcttgcagtgagccgagatcgcgccactgcactccagcctgggcgacagagcgagactaggtctcgaaaaaaaaaaaattgttttagttattcattaaggtttattttttgcatttccatataaattttagaattagttggtctatttctataaaaaggcctgctaaaattttgagtgatattgcattgcacttacagaaaattgggggtagaactgccatctggaagctattaaatcctctaattcatgaacatgacatatctgtcaatttattaaggttctttaatttttgtcagcattgtttttggacttttcagtgcagaggtcatggacatctttaagaaaacataaaggccattgacttgaagaaactatttgaaacatgtaaattattccaaagtcttgtgtacagcatatgtaaaaagctcttacaactcaataaaagagaagaaatagcccaatttaagaattaacaaaatattttcgtagaatcttcacaataaaaaaataaaaatgaccaataaacacaggaaaagatgctctacatcaggagtcaacaaaatatggcccatgagccaaattcagccatccacctattttcataaagctttatttaaacacagagatgcttgggtttttttagtgtgttatcaatggcttctttcatgctgcaacggtagaactgagtagttgccattgagactgaatcacctgcaaggcttaaaatacttactattcaaccctttatagaaaaagtctactgactcttatgtcgttaataatcagggaagtgcaagttaatactgtaataaaatatatagccactatatggagcatatatgctatataatatatatgctatatatatgttatataatatatatgctctttatatatgctatatatatgctcctatatagccactatgttggctaaaagtgaaaaaatgactactataccaagtgttgacaaagatgaagtgtaattaactaagttagatctatttaaggacatattctctttagtgcgaagacttctccccgacctgatgttgccattatgtgaggaaggagatcccatgaagtgactccatctgacggccagtttctgcctctgaaggaaccccagagcagttgcggtgtcactgtttcagtagccctgttctctcctggtacctccagcatcccaatcaattcctccagatccgcctgagacatacctgacctcagcaaggacaaaaatctcctttcatctgaagaaatcattggctcaagaggaggactgagccacttatttcagtgttctgatagatgtaggggttgctgaaccgttttaagaagctgtaggaaattgtttgatgtaaactccctatatggccacaagggggcaatgcttcttcaaagaagattaacatttgtccaaatacacatattcagcaattagccagagattatccttttaaaatagtaaattatctcctactctgtttcaattcacgtgtctctttcattcaatgcatctatgcatttatccattcatctacctaactagtatctgtatttattctagtctaacagagtggaaaacatcactttggaagtcaacacttttttgaattatacatgttatccttcaagcccacattaacttctgtagtataactttacaaggttttcacccacatacagcccaatatccagtcacactaatctgtgcctaaaattcccttatccattctttttatggggaaatctatcatggtttgtggcccagttcaagcatctccccatccgtactcttctttgactgggtccagaaacagatttcatcaccctttccttcgtcacatcatctagacacactggtgtctttggcaggttccattggctgatacctgagtcttgggactaggttgactgaagacttggactgtgtctctttcgtgaatgaaatgaggcccaagtactgcctaatttagtaggcactttgtggacagtatatatgtattgaatatatgcatatataaattaaaagaaaagaaagcacatcaaaacttaaacaacttttaaaaagcaccttagggtactggggaagaaaaggtttggattgtagattgaggaacgtggaccattgtctcctattggactgcgatggtgttttctttgagtggatttgagatgacaccaaatataaatacaaaaaaatcatttttgtgcttctgaaaaaaatgtgcttctcatgttattttaacttatatgacttataatacagatcatccctatttcaggggtgctttagaatttatcttcaatttctcccttgtatcttgcctgtgttaatatcaaaagttaaatttattctttatattttcatagttgatcgattttgaagtgtgaataaaatatcgaatgtttattcaaactcaggataagagccaccaaaaatgactgcattacggatggttatagatctatatcttctgcagaatttttctatcctctctttccatttaaagatcacagctcctccagaacagataattccagtatttcctattttctttttctaggtacatttaaaaaaatatttaatttacctaatgtgtaatttagaaaaaaatatggagaaaaaataaaattgacttaattgtattatatcatttctgaggatcatctaaaatatggaatgaatacatctgaaaaattgcaacaaaatttaagttctctgaggacaaagggaccatatattctctatgttctgattcatgaccttagcttgtaatggggtattatgcccattgtgtgccctcaataaactttattaatactcacaataaaaaagaaatgccactgtacatgttaatcgtgcggtttcacaagagttcctctcttctaccattgtaaaataaggccctttctattgacatatccagccatcttaaaggtctgaggaaaagttgagggggcttgacagacagaaattctaaactgatgcttatctgtgtgtaaagaaaggattactgattcccaatgaatatatcttcagcaattctaaatttggacaaagtggggaagtgcttcctttgacagagacagctttaagtgaaagcacttgtgaaagggcggggcctgctgaaagaattcagttgagggtgaatttacagagtttcagctggttgggaagactggaagaccacctgggctgtcattgagctctggtgccaggaggaatggacaagatcttaggagcatcatttttagttctgtggcttcaactatgctgtgagttatggaagagaaactccaggatatgttactaacttgggtgaatgagaaaattggggtacagacaaactcatgcaggtagacactttaagaagaaaatattattttggggcctaatgacattttgttatctctctaagcaggggtgagtggccaacagaaggagaaaagtgaccagcagcaggtgaaacaaagtcctcaatctttgatagtccagaaaggagggatttcaattataaactgtgcttatgagaacactgcgtttgactactttccatggtaccaacaattccctgggaaaggccctgcattattgatagccatacgtccagatgtgagtgaaaagaaagaaggaagattcacaatctccttcaataaaagtgccaagcagttctcatcgcatatcatggattcccagcctggagactcagccacctacttctgtgcagcaagcacacagtgctccccaggcacctgaagcctgtacccaaacctgcagttgaggttccagccaaaccccacagtgggagcttacgtaggcagagatgtagcctagttttcatctgcatatgcaagtgataaataaatgtataaacactagtgtggcagtatgagaatggtaattaaagaaaagaaacttagcttaataaatgaccatctctaacaaatgttttattatagttacagtatttgaaattgttacaagcatccagccagttttggggcaactgggaattttatgccttgctgatgggatgcaaatcagtattatgacactggaaaatcatttgccagtttcttataaattgctcttaacataggaccagaaattccactcctaagtatttatctataataaatgaaaatatatcttcacacaagacttttgtttacagcagttttaaccataatagccccaagctggaaacaacccaaatgtccattagctggggaatagaaaaataaattgtggactattcctataatggaatactacagagcaataaaatgcaataagctagtgatacaggtaacacatgacggatctcagaactttatgcttcattgagtgaatggttaaatatactgtggcacatacccacataatggaatatgattcatcaataaaaaacatgaattattgatgcatgcaacaactttgatgaatctcaagggcattatgttgagtgaacaaaagtcaatctcaaaggctatataatgtgtgatttcccttatataacactatcaatatgtaaaaattacaggacagtggttgccagaagttatgggtggggagtgtgtatatagggagtttatttagggtgatggatggaatagttctgtatcctgattgtagttgttagggaaatctatacatatgataaaatgtcacagaagtatatatcaaaaaaagagtgcatataaaaatgggtgaatccaatagcaaagacttggaaccaacccaaatgtccaacaatagactggattaagaaaatgtggcacatatacaccatggaatactatgcagccataaaaaatgaagagttcatgtcctttgtaggaacatggatgaaactggaaaccatcattctcagcaaactatcgcaaggacaaaaaaccaaacaccgcatgttctcactcataggtgggaatagaacaatgagaacacatggacacaggaaggggaacatcacacaccagggcctgttgtggggtgggggatgggggagggaaaccattaggagatatacctaatgctaaatgatgagttaatgggtgcagcacaccaacatggcacatgtatacacatgtaacaaacctgcacattgtgcacgtgtaccctaaaacttaaagtataataataataataataaaagttctttaagcaaaaaaaaaaagggtgaatcagaataagatctgtagtttaataaatactattgtatcaatatcaattttctggttttgatactagtacataatgataatggtacatagctatggttatgtaaaatgttatcattagagaatgctgggtgaaatgtgcaagagaactctgcgttatttttgcaacttctacgtgagtctaaaattatttcaaaataaaaagtaaggatgtagaaaaaagatttttaacaaacatttacaaatttttggaatataaaattttggaatgtggaattttagaacatggttggaacataaactgggcaaccactttggtggattttcataaaactaaatgcgtttctaccacaacccagtgactcacatctaggcatttacccaagaaaaataaaaatgtgtcaacacaaagacttgtacaagaatgttcacaacagttttattcataatagccatcaatttgagaaaacacccataaacaagatactaaatcaataaatttttgtgtcacacacattcaatggaatattaatcagcaataaaatggcctgaaccactgatacacataacagtacaaacaagcctagattatataatgcctagcaaaattgccaaatacaaaagggtatatactgtttgattcaagttatgtgaatttctaaagtagacaaattaatccacggtgaaataaagccaaacagtgattacatctgtgagtgggaattatttgggtggagcacaatgaatttttataagctaaaggaaaagaaatgttctatttcatgataggggtgtggtttacaaggctgtttgcaattttcaaaactcatctaactccatacttatgacttgtttatttcactatatcaattatacttcaattaaaaataaactacagaaattaatcaaataggaaacaaaaacaaaacaattaggggaaaatccaatgccgaataaatttgaagaaataaaagagttaaatactcgataatgttgataatgaggaaaatagaaaatagttaaacaatgcagtacgctgaattctggcccccaaagatgtccatgtcaaaaaccccagagtctatgaatatgctgcttcacatggtatattagttttctagggctgcagtaacaaagtaccgtggactgggtggcttaggacaacagaaatttactgtctcctggttctagtggccaaaagtctggaaccaaggtgttgcagagccatgctccttctggggcgctagggaagatttgtttcagacctcgttccgagtatctgatggtcacaagcatcccttagcttagagatggtcatgtcctccctgtgtctcctcccatcatctttcctctgtttgtgtctctgtctcttcacgtgacattcttttcataagggcaccagtcttattggactaagggcccgcactactccagtaggatctcatttcaacttaactaatgacattggcaatgaccctatttccaaaaaagttcacattctaagcttctagaggttagaacttcaacatatgaattttctggggatacaatttaaccgaataacatatagtgaaaggaactttacatatatgattaattcaaaaatcttgaaatgagaagatttatcctcaattatccaggcagacccagtggaatcacaaggatctctataaaagggaggcagtagacttggaatgaaagaaagcaatgtgatgagagaatgagaacagcctcgaagttggaaaaggcaaaaaaaaaaaaaaaaagaaaaaagacagattattccccatagccaccagaaggaactcagacctgctggtaccttgactttagtccagtgaaactgattttggatttaagatctccagaattgcaaaataataaatgtgtgctgttttaagccactgattttgtggtaatttcttatagccacaataggagactaataaattcaataataggagagattaaaaaggagacatgtctggagataaagtagaaattaaaaaaaaattagcataagttaagtacaatttaagccaataaattttaaaactttaaaaagtagaaacaatttgaatgaaaaacatatactaccaaaagtaactcaagaagaaatagaaaaactaagtagatttataaccattaaattatttgataattggaaatgaaaatccctaaagatttagtaatagaagggaaatttttaacctgcatgtgcgcccactacaaaattaaaaacaagacacatgctggatgcatctgtaaataatataaccaataagattttagaaattaaggttagatggggaactcttacaaataaataagaaaacattcaaaataagaagagacaaggatataaaaggcaattcaaaaagaagaaataggaatggccactaaatatgtaaaacatcaacttccacagaactcgaggaaatcaaattaaaataaattattgtttcatttctatttgatcaacaaaatctaaaatatctggtaacattaagtattggtaggaatacatggagatgaagctgttacacttttccagatgaagaaaaacaccacacagagaatttaggataacaatttgcctaaactagttatgaatttgcacatatctaataatccagcaatacaaatttctgatatctacataaaggtagtcaaaatgtaaactaggaggcatttacaaggatgctcactgcaaccctctttaaaaataagtataatcacaagaaaaaaacaaccccatcaataagtgggcgaaggacatgaacagacacttctcaagacatttatgcagcctacagacacatgaaaaaatgctcatcatcactggccatcagagaaatgcaaatcaaaaccacaatgagataccatctcacaccagttagaatggcaatcattaaaaagtcaggaccacttttacactgttagtgggagtgtaaactagttcaaccattgtggaagacagtgtggcgattcctcaaggatctagaactagaaataccatttgacccagccatcccattactgggtatatacccaaaggattataaatcatgctgctataaagacacatgcacacgtatgtttattgcggcactattcacaatagcaaagacttggaaccaacccaaatgtccatcaatgatagactggattaagaaaatgtggcacatatacaccatggaatactatgcagccatacaaatgaagagttcatgtcctttgtagggatgtggatgaagctggaaaccaacattctcagcaaactatcgcaaggacagaaaaccaaacaccacgtgttctgactcataggtgggaattgaacaatgagaacgcatggacacaggaaggggaacatcacacaccggggcctgttgtggggtgaggggagcggggagggatagcatttggagatatacctaatgtaaatgacgagttaatgggtgcagacaccaacatggtatatgtatacatatgtaacaaacctgcacgttgtgcacatgtatcctagaacttaaagtataataaaaaaaatacaatacattcattaaaaaaaagtataatcaatagtggaataaaaaatagtggtttagtcatacaatggaagtattagccattacaagcaaagaagtggttctatacatattttcttagatgaatcttacaaataaaatgttggatgtaaaagcagaatgatacatactgcatggcaccattaataagaaatcttaaaatacaaaataatgcagtatattgttttgtaatacatacctgtaatggttaaattctttttttttttgagacggcatcttgctctgtcgcccaggctggagtgcagtggcacgatctcggctcactgcaagctccctctcctggattcacgccattctcctgtctcagcctccggagtagctgggactaaagggagcgccaccacgcccggctaatttttgtgtgtgtgtgtttttagtagagacggggtctcaccatgttagacaggatggtctcgataccctgacctcgtgatctgcccacatcggcctcccaaagtgctgggattacaggcgtcagccaccgtgcccggcctgtaagggttaaattttaaaagacatgcgtggaaacttcccaagagtggttactatctttgaaagaataaaaggaacaaggactattgttctagctttgtctgaaatgtttgagaaaatctgaaatgtagagagagaaagaatatttttagaaaacatagcaaaattcatcatctgtttatgtgtttattctcattgctggatacgaaggtgcctgctatataattttctgtacttttgctcatgataattatttcataaatttaaaaaataatttttaaatggatagcgacaatcatagtttttactatcttcaccagtccacagaagagaatagcaccttcattacctacaactttgccagatgtatttctggtaggccacataaatggcaataaaacatcaattggaaaaaatctctaatttatgaataaaaggatgttcaacctgaaataaacaacccaagactctttcccctgaaccacaatgcatacattttcaatatattaaaaagaggatgtggaaaaaaaatccaattagttacctcttagcaatgggagatgtggccacaaaatgtcagcattttgtgaatattaactcccctgggctctcaaagtttattttacttccttttttagcagtttgaaaaatcgaagaagaaattggaatagtatttatgtctgattagagtggctttcattggactgaaatattcaagaataaagtagaatacagtgcctaggatgaattcgtggtcagcatgagaagagggctgttgtcaagtatatgagagagaggaagaaatgggaagagctgggagtctcaacagtgattctgtggcttcatacagatgtgagtttggggatttctacaaagaaccaggaagagtctgaggacagtttgccacagaatcactcaactattcccatttggatttctttatggggcagtccaacaaaaatacagcttttggaatttggtgctttgacataaactgctctatcagatgaagtttcagcataaagtggaaaagaatcttcattctttcaatgtccaaagagggaaatatttttattttggacatttatactattaatagttttgaatatttttactgataaagcagcattttgtgagaagccttgtcttcctgataattattaaaaattatagaattgcaccaaacagtacacatgcactcatggcaacagcatagctaaagatttgaattcagagggcccatggattctcccatcctagaacttcaaataaaattaagcatagagttatagtagaaataataggcctttgccgttactattgacagtagaacacacaactggagaaaatacagaacctgggagtcttttttttttaatctcatttgtctgagctgttgctttgccattgtgaagttccaattcccttggtttgatgggtaagtaggaaggacgggaggtgatgacttctggtttgtctcctgtgtcaaagccaaggattggtgagcagcttcacctttgactcaggttggtagcaagtgaacaatcaaaacatgaatgtatatttgtaatcaaagccatgattcataataaattggtttcagataagcccctcagatttatcacagatcaatttcctaaacttggaaattttaaatgactaatctccttttaagaattccttcaatattgtttcatgcatgtcctttaccagatataatcctttgtcatttgttaattaaattataagaaagggcaaaacgatgtttaggatagaaccaatttcccagcctagggattatcatagcacattcacacttgacccacccagaaaccacatttcagaggcagcttccatacagaactgagggaccctgcacctgtactgtcagggtacagagcagggctatttcaacaggaaggaaatcctgccatcatactgcttcccagtctactgtgagtattcatggtctccatctacttaggtacaaataattgcaaaccagagcatggatacctctcagcactcagaggtgaaacgggactaaggagtagatgtctcaaacaatgagaaactattccctgcaccactcagtgatatgctattttgacctttataaaagaactggaaatgttttagagaccttgtctgcactttctttcttagctatctcttggtccctttatattaattcgtccattaagttagtgaaactagaggctgggttcacacatataatcccagcactttgggaagccaagataaggtcacttgaggccaggagtttgagaccagtctgggcaacgtagagagactccatctctacaaagtaaaataaaaatttagccaggcctggtagctcgcaactggagtcctagccatttgggaggctgcggtgacaaaattacttgagcctaggagttccaggctgcagtgagttctgattgtgccactgcacttcagtctgggtgacaaagagagacccccaactctaaaataaaaatttttctatttaaatttttaaaaaagacaatgaaatcacatggaagattaacatctaaattccatacaatcacgtaacagcatacaaaaaattcagccaccaacttctgtggtattgacatgcacaaagttcttgcaaccttcagataacacgttctgtgggagtatattatagcattgtatcatttgcatcacagagagatcttgtatgcttatcatgacaaacaatgtcttatgcttatcattaaaaattttaaaaatgcccagccacagaatgtaacaagtgagactgaatactttggatcaatgggatagaaaatgtgatatcaggacaattctaggacacatgatctaagaagtataattctacttgtgaaggcaacaggactgaatatactgatcctcctcagtctagtaaataaaacttagtgtcagattttgaaatgattacattttattgctgttataatttcataaagagataaaaaactgagcagcttctgaaagtcgagaaggactgatttttatcatttgattttgaagtagctttacttattatagaacttaactagggccctagacctcagtaaggaggaagaaagagatgcagtaattgtttagaataggactgcctttcacagagaaagtcaaatatctgagtatttttcttttaaatttaattagtttctgatggcaaaaagtaaatatatgctaaatgaataatatcaatgtatgtcaactggttcaactgcagttcccctcaatacaaattgcttttcttatatcccttttctaggttctgtctatcctaatgactagggaaagacaactagacaaagtaaagattcaggggtgagccagacatttttcctcatctgtgcatagccatgtagtctatgaacatgagactcaatttcctgtttggggagatagcatcagaacccaggaactacatatacacaccgcagggccctggtaggcactgaactttgagcttcaggcagcacaactcacatttgtgcaaagagctacatgccacatgctgttctccagcctgctgtgtgtatttgtggccttcagctactctggtatggatggttccaagtgtgagtaaaaatgttaaggatggaaggattccaaacaggcatatggtatttctcatggacttgaggaggaaaggagaaattgtaaaaaagcgagcatattatgattttagtttggtttgtctctgggtcctaaattagtctagctcttacgatattttattcactatatcaaaggatcagctctgttttctgatttttcccacaggatcaagtgtggcccagaaggttactcaagcccagtcatcagtatccatgccagtgaggaaagcagtcaccctgaactgcctgtatgaaacaagttggtggtcatattatattttttggtacaagcaacttcccagcaaagagatgattttccttattcgccagggttctgatgaacagaatgcaaaaagtggtcgctattctgtcaacttcaagaaagcagcgaaatccgtcgccttaaccatttcagccttacagctagaagattcagcaaagtacttttgtgctcttggggaactcacagtgtttgaagtgatagtaaaagcaaaacaaaaaccctagggctcaataagagaacccctctactccccatcctttgctacaggagccaatctgaaatgcacacctgcagatctcaggcaagagagggtagtgactgtggtctgtggatttaatctgtggtctggatcagatgatttaattccaagtaaaacctccttctatctcacttggaaacaggtgttcagagcaactttcttctaatacttcaatttttacttaaaatagatcatacagaaaatgtgtaaagttgtctaaagttggaaagacttccacataataacttaaagtggcagtctcacttaacgatgctcacagcagaaatctgggtctagttatcttgaatcaccataaaaatcatttccttagccctttcctcttaagctttatgtcagttaggatacaatcagggaagcagaaccatcgtgaaagatgtagaataagattaattataaggattagacctcatgcaattgctggaacgggtggctctcggaagttacttagttgtttatgtttttatgaaattgtaacaggaataaaatgtaatcttttcaaaatctgacactgagttttatgtactaggctgaagaggatcaggacattcagtcctattggcttcacaagtagaatagtacttcttagatcatgtgtcctagaattctcctgataccacatttctatcccattaatccaaactattcagtctcacttgttaaattctgtggctgggcatgtttttcatgtgtaaaataaagtcgtgataagcatgccagatttctgtgatacgatgccataatctgctcttactcctatgcaaagctgtttgctgaatttactctaggtcagctagactcacatttgggaaggagagttgaacatggacaagagcatgcaaaagctgtgatttgtaaagacattttggaacccatggtgacaggtggaacccacgaggacaaactaaaacttgtctgtctcttacctccttcaatctcatagtgttggtgaccttcagaagaaatggtgttatttgctatcatgctccctgggtacttggcccaagaaaaagagaagctgaaagaggagatctggggggagtgggggagttgtgaatcaacaataagatgagttagcagatcagagcaacatatgtgagttgccacagtgcctggagcctggcacctgccttacacaatttttttcaacttaatcgagaacaatatagggaaggattttcttagaaatatatttccaggtagttacgacgagacagtacaaagttaccacaatacccccaccttgtaaacttgacatccatatgcacctcttttaatagcacttagctttcaaataaaggcaattttaaaaagcatacttcctgccaatatgatgccactgttcttcattcaaccacacataccctaaccctctcccctaaagagaatacaaagtatttattcatctttgggtgatgttctttcctcttctagctgagtcacactctcccattgatatcctgtagtttagcttctgagatataacaagctataagagtaacttattaacatatctttcactattatgtataggcaaatgggaggagagtaaaaaatggttgacatgtattttaatattttcatatcacaatgaaaaagaaatgtttataacagtatagtctttttttccacaaatggtcacatgattgtagctggtttctataactacctcttccattacccatttcataatctgttttcagcaagcacctcaactcactggtacacttgactttctataaaacaagctccttggtcaggagcaatgttatacagaatgccataaagttgagtaaggaattctctaagcccaccactgtggttttgccagaagcactgcagatgtggaaggaaagtccatattcagaatgtctaagtggactaaaacaaagcaaaacttgccagcagccagagaaagttgatatatcatgatatatcatgatatatcatgtctttaagaatgattgctgaattctcatcaaaatcaacagaagccaaagaggaaaaagtatttttagagtacttacaaaacaaacaaacaaacaaacaaacaaaaaaactctctagctagcttcctatgaacatgaaagtctaattttaaaccctttgtcaaaaatcattgttaaaaaggtggaaagtcagtgcacagattgggaaattatatttgcattggtgtatttctgaaaaagattcaaatgcagaatatataaaaaacttgtacaagtcaacaagcaatgagaaaacaatacaaatggccaaaacttgaagagacacttcagaaatatgatatctaatagtaataagcatacacaaaaagcacttaatataattactcattaggaaaatgaaaatgaaaccccattgagtgatccccctgtgccctttcagcaccccagttgtattaatgtagccaggaggaaatgaccacaagaggataatgaaaaatagtgactacttccaggggaagggatggccaagtaggttttctagaaacttctgttaaattaagtttagcctaaagctgcctccttatttatttaaaactcagggcaaaggtttctccatacatagggccctgtaacctaacaggatgcataaacaggctacagtctgctctctaccaatccctaagtttcggccataggtggccaactgttcaaacatgttcaaataaggcaaatgccaagctttaaccaatccatctgtttctgtaccttacttcctttttctataagtcactttactttctctgtccataaatattctttgaccatgtggcagtgacagagtctctctgaacctgttctggtctggtggggggctgcctgaatctctaatcgttctttgcttaattaaactctgtaaaatttaattcgtctaaagtttttcttttaacatgtccatcattgaaccatgttcagtggaagaagaaaaagcagtaacaggctaaagaccggaacactgaaggaaagcaggttttactaggaaaaaagaaagttggtattcattggccatactatatgtcaggcactatttatacatttcaaattcattacctaatttaagcatcatacaccctacgagataggttttagtcttccaattttttatatttgggaaatgagacacagctttccctaactttgaaaagcatctctaactaaagtcagccagggtgtaacatcttagagggctcctaaaaaatcaaagtttggactatggagaagcaaatagccacaaagcagcagcattggctttctcagtgaggatgacaagatgacaaacctaggcacaaattgcctcaggatcaacagatggaggaaatcaccgactaagtatttaagagtgctgaatgtatcagtgagtctcttctacagtagtgtgctatgaagcacaagaggctagagggaaagatgagatactattccttaaacactccaagcgggcttccatatcaaggcctttgcccactctgcctgcaatgctatacccccacaaaacctcatggtgtagctctgaactcctctacgtctttacgcaaaagtcaccactttgtgaagcctttatcgaaatctttctattgtatattccttctttgagaatcaggctctagcgtattccacgtgttgagaactaaagcaccaagttctgaagcactgccacctggtgtcccgctgaactatttggtgaggtttacgctggcttccctgctgccctccagtgttcacgggctaagctgtgatgaagcctggttgcaataggagctagcatttctgaaccagtcagtaaccttcccatggtagtaatcatgtgagacaggattcagcaggactggctgagacttttttttttctttgaaggaagcaatttttatcccttacgcagcttgtccctgctactgtgtcttgtctccattgcctggatccagacctcacaagttatttatgtatttatgtatttatttatttatttatttattccaaggcagaagaatttttcttagtacagaacaaaatggagtctcctatgtctacttctttctacacagacacagtaacaatctgttctctctttcttttccccacatttcccccttttcttttctacaaaaccgccatcgtcatcactgcccgttctcgatggtcgctgtctcttcggagctgttgggtacacctcccagacggggcggccgggcagaggcactcacttcctagacggggcggccgggcagaggcgctggctgggacttttttaaatttcatttttaaaatatttttcccttaatatgtgaggttgattgatttcaaaatggcaaatataatatatgggatggtttaagctaatagaataccttggaaacaaaggttggcattattgcacaaggtgggaagtttttctctattaagtgagagttcatctactgctctgtcccttactgtagtatagaaatatcctaagaagtgagaacaagagtcaatgatggagagaaataagccattgtagggaacacagtgcagcatactctctccatgttatcatatgctgcccaacctcccaatatagcatcataacgccactgatttcccactaacagtaagaaacatgatagaacatggatatgtattatagtacataaaatatgctatgcaaattgcaaaatgcccctcggaaaaatactgaattttatcttgtggatagactgcactgcaatttcagatacagtctcccaaccccccaatattttctatattgaatgcatctggttgagtgcctaagatacagaagttattgtattagatgatttattcggttggtgtaaaagtaatttctgctttttccattacttataatgtaatggcataaccattatataggcttggattgcatttctggacctaccactcattggttgaattatcttgagcaaattacttaataacttttatgcttcagtctccttatccctacaatgtggatattgatagtacttactacaaagggttattttgagaaataaacaaaatgacaaatgccaatgcttagcccagtaccaacaaaaagctactggttacttacagaaaaggaaattgaatatgagagagattaaatgtcttgcctagcatcacaaagtgtcagagttgagccttccctccatgccttatgtagagcagataccttttctcaccccaagaataactctctatctcattacagtgctatattgtctttatagagcttatcaccgtatagaattatcttattttgtaaaaactcatttatttaacttcttctcattgcactctagtcccttttctatctcttcaccaccatgttctccatgcctggaacaatgcctagcacacaggagacacaaacaatacatgtttgttgaatgaatgcacaaaaggtaaaattatgtccagagtccttgcaattcaaatattaatataacagtttaagctggattaatctttgtgttatttatccagaattgtcaagatttatatcctgtaagtttcttaacgtaatatttaaatatgtaaaggctaaatagttgaatactagctttggtttatctacattggtttatttttgcactttgggggaattaataaataatcttactaaaaattttatctataaatccctcactttactcactgtggatatgaggtagaaaaaattctgaggcatttttctctgtagtgcatgcatcttatcttttatgttgcaaaagtttttcagaggactcatgtatatgtatatatttttatgttttaaaaaattctgtgtgcacacatacacacacacacacacacacacacacactccttgcataagagttgatatacaggcccactgtttgctcaaaacagagaaagcaaattgaccttgtttcccttcactatcagggtgggtacatttagaatcctccctgatatattaggctgttaagaatgataaagattgatattactagttgagttgtcctgtggccaaagtggggaggaaggaaactaggatcatgcactcttccagaaagagaatctcgtaaggctgtatttagttgccaacaggcttggcctttacttcaggtcaaatgtgtggctataccttgcaggattctgtcctactattatagatagaggaattctccctgctgttagaggtatatcttcttgatctggacactgctccttcaacatgtgggtgaatttatcagtggatcggtgttctcaccagaaatgagctccacagcatgtaggctttctgagtgattgtggccatgacttcactctcctatgataaagttacctgaatgctatgatcttctccatgcatctggagaagaaactacagaaaagaaactactacagcaaagacttggaaccaagccaaatgcccatcagtgatagactggattaagaaaatgtggcacatatacaccatggaatactatgcaatcataagcaggatgagtttatgtccttggcagggacatgaatgaagctggaaaccatcattctcagcaagctatcacaagaccagaaaaccaaatactgcatgttctcactcataagtgggagttgaacaatgagaacacatggacacagggaggggaatatcgcacaccagggtctgtcaggggatgggggactaggggaggtataacattagcagaaatacctaacgtaggtgacaggtcgatgggtgcagcaaaccaccagggcatgtgtatacctatgtaacaaagctgcacgttctgaacatgtaccccaggacttaaagtatgatttaaaaaaaagaatggcttgtttgtctagcagccatccctaaccctagtcctcatgcttctgaactaggagtcattattgaggcttccaggatttcctttactacccatacatttatctccttttctgggaaggaaagctagaagttaaccattgagatactttctaatcctgttctaattttttagaacgtgatttaaatgtatgtggaaagtgctgtcccctgattttagtacataccccatgctgtttcctttgcttacttcagttgttcactggaaaggttttaaaggcacttcatacactaaatacctagaggttaaatttatattctgaaaaaaattaatgctatcttatattattaaatttcccttggatatatcttatttctccaattatattttgggctcacagggaatagggaatgttgctttgtaatctttttttctttcttttcctctcccctagatgaggctgtagctttgtaatttttaattcctcagagctcctagggaaattcaaagcacaaaaattactgtttaaaaaatacatgcatattgaatcaaactaacgttatatctggactgtgacagaagcaagacagcataattcttatttacttttaaacaactttattggagtatgtttacgttccataaattcatccattttaaatgtatggttcagtgatttttaattaataactgatttatgaaactattaccataatctatttgtaaatccttttcaacactctagaaagatccttcatgccaaacttatagttaatctctaacccaaccctggccccaggcaaccggcttacatctttatagatcttccttttctgaacatttcatataaatggaatcactcaatatgtaatcttttgtggctggattctttttcttaaaatagtatttttgaggctcatctgtgttgtagcatatattatgttttattttatttatttcatttttgcttatttattttattttatttattatttatttatttttgttgccgaatatcattcacatcttgtatgaacatactgcattttgtttattcattcaccagctgatggacatttgggttgttctcatttttttagccttaataaagaatatccacaaattagacttccattatttttagaacatatctaacatgtaaaacattcatggtgcatcacaaatgtaggtggcatatcagattccaattataaagtctagagctagacagatatatgttctaattcttaatatgccacttaggtaattgaccttgagtgaattatttaatctccttgagctttgggttattttttgtttgtaaattagaaacagtaatgtctctattgcatgactttcttattagatagatgtacataaagaaaaaggtaatttagatgtgtgcacatttataatttgagggggattcaaaagttgttttttaatgtttgaagattcaaagaaaaatgcttttcctgccacaaatgccatcccacctgtaactccctctaaatttgaataatagcagtccacagttaggcagcgcacttctgaaagggtgtcaattctcgttgtgttccacactcatgggggatttcctcaaagtttatgaagttggcctgaagaaagcagttacttcgactcctctttgtgaaccacaggaaactgaacatagggcagagcgtttctaggacatttatgggagctggtctctgattggctaggcaaccagatgcagaatcctgttttctgaagcagaatatttccacagattttggctgcaaaacgtttttctgctgtgggtacgtgagcaggaaacatggagaagaatcctttggcagccccattactaatcctctggtttcatcttgactgtaagtccaggggttacaggagacattcttagtctggggtgatgatgaggaaggaggaggatgcagtcagacactctaggttttatttggggatgtgtgaagaaaatgccaactctgtagagagaccaatttctatgtctgactcttttttaaaaaaacaggcgtgagcagcatactgaacgtggaacaaagtcctcagtcactgcatgttcaggagggagacagcaccaatttcacctgcagcttcccttccagcaatttttatgccttacactggtacagatgggaaactgcaaaaagccccgaggccttgtttgtaatgactttaaatggggatgaaaagaagaaaggacgaataagtgccactcttaataccaaggagggttacagctatttgtacatcaaaggatcccagcctgaagactcagccacatacctctgtgcctttacacagtgctgttcaggcacctgcagcccatacgcaaacctgtgtctggtgttgcactgttaccagcattgacaaagaaccatgagtaggatggaaaagacaagttcgttgaattacagttttttttcaagaggattgtgcaaacatagaaaaataagcatgctagtgatcataactaactaccacaagagcaaattaagtaaacatattccttatgacagatagatgtcagagtgctaatgaagcataacacatgacctggtaactgggccgttactaaacaatactaaccccagctcccaacagctcattaaccacatcatggagtcagacccattgcctgctcttttggcatgattctgaaagaacccaatagttactcaaatctatctaaaacaatctgggtaaacaaaggcgatatttaccccctcattgttgctatgtcctgaaaacgaattcttctattatactttatcacagcacaaaaggagcatgtcggcatgcccctccctcacacacctggcctggaaatatgcatgtttaataccagaacaggtgatgctgcctcctttaatccattggggattttggttttgctttagttcaacttttcccccacatgaacatttgtatttttatttcttctcacatgtggctattttcatttttaaatatcactgataatatcataaaggagcactgatgaaggaccttcactattttacgtggtctataccccagcttgtactgtgattgtgatattggatgactaactgaactctattatcaaagtctcttcatttgtaatttccaggtatattaagtaggctgagtgtttggtgctctcctccttttgcagatttccaaacaacccaccagtttaaggtcccacttgtactctagaggcatctaattctaagcgttcttgggggctgttaagatgaagtaagttgcttctgggcctcctcatctaaaagctagaatttcaactttctctaaacatctacattaataattatttatccagctcctgtccagtttcctaaattatgctgctattgcattttctctctcttttgtggatttatgtttttaaaaatattattgttattatcacatatttaggaaaaaaagctggtacattttaaaaataataatggagtgtatacaaatctctgactggacccatttagagatatatatatatagagagagaattacttttttcaaaatttattcacaaggtagtaatgaatctatttgactatcagatcagaagcggctaaatttgtaatattatttgaacatatatggaatcagaagggtatagcacaggactgagtgcggagaagctatggttcattgtaccctagtgtcggtggagaagaactacacaaaagaagactgatcactgttccagctgctagtcaaattcccaaaccagctctccattattggcataaagatcaatggaagaatttctaatatttccagcaatgatcttgaggcttgaactaactctgaattggtagaatcaaaaggcatgagtaaaataaaagatgaacatctgactcatttgtgtgtggctgcaacacaatgcctcacagtctcccgcatgtcaaggcacacatagaaattaattacattcatacaacacttcagtgtggaatgacgctgcttgaaaccagcccatgactccaacttccttgagaactctgcctgccttaagccacgatgagatagagatcttcccacacacacgatcaagaaaaatgtaaatctgtggtgcatggtccttacaaaaatatccctatctttatgaaagctgtatgtaaccaagtaaatatggatgaaaattttcagtgtctttggattctaaaactgatctgaaattgaaaataatgtgtcaaattctgattatttatagagacacaggcatgttcttgtaaattttgttagtttagacacatggaaagagaagagtgagtgaaatataaaaatgttaaataagaaacacagatctctgttgattgcagggccccaacctgagcaatcagccacctgctcctgtactgtggctgcacagagctcttgttacctctgatcattgccaccaggtcttctgtgccagtgcagaagcacaaggctggcttttgaaaagaagtttggtgaaacaggcagatgtttcagatcaagctattagagactagcagaaatcagccagaggaagcatacatttttattgttgatttctcacaagttctcaaaaagactatttttcattgaactccagagcttttgtggcttgctgaataacaaactgttgtacaactcacttaagcaagtgccattttactatctcatgatacttctgctccttgtgatgctgactgcagctagggtcctctgggggcttgcctgactagaacccctggagctcacttccatacccggagccttggtgggaatgcggaaggctgggctcatctctcatcccaactattctcagggctttcattacacatggcctctgcatgtggtctctcatcaagatctctctagggcttccaatattacaaaagtggaaggtgccaggcctttttaatgtttaggccagaactgccacaatattatttctactgcattctcatgcatacataagaaccatgaatgtgacattacttggaaaaggggcctctgtaaatataattaaaattgagtcatagagccaacccagagtcaacatagaagggaaatacacaagggcatgaatatcagaagcacgattttgagggcatctttggatactaactcccacaagagctaactaagtaaacatattcctatgccagatagatatcagagtgctaatgaagcataacacatgaccttgataatccagtaattatcaaggtcatgtcaatttgaacttccaaatactgctcgtatctgtttctctatttctatattgcttactgctttcctaatttaggcattcagcacctctcacttggatgattgcaatggcttcctaattgtcttcctgcctctattctcaactctttgaatctaacttctacatggcaactagagttattataaaatgtatctaataagatcacttcctgcctccctttgggtagtaaggaaccactagaagttgaaactctgtattaaaactacaaggccggctgggtgtggtggctcatgtccgtaatcccagcactttgggaggccgaggcaggtggatcacctgaggtcaggagttcgagaccagcctgaacaacatggcgaaaccccgtctctactaaaaatacaaaaatttgccggacgtggtggcatgctcctataatcccagctactcaagaggctgagacaggagaattgcttgaacccaggaggtggaggttgcagtgagctgagattgccactgcacttcagcctgagtgacaaagcaagactccgtctcaaaaagaaacaaacaaacaaacaaacaaaaatacaaggccatctacagaatcctgtttaccttctattttaatcttccatccttctctcatatatgtaatatatatatatttatattatatatatttatatattatatatgtatatttaaattctaaccctttatgtgaatattaagggccttcctaaatctgaccccttttcccagaatatatttttcccattgtaatatgcacacaggtctactcaccctttatggcccaattcaggcattatttattttttatctgagatttcatagaatctcatagaatctgagatttcatagaataacacttgtaacatcttattataaatatttttgaatctgatcctctcttacaattgttttgacaaaaatatttgccactgagagctattatatgtttatattcaatggaaatgtttcctactaggaaatgcagagattcagtctaagagtgcagagatttcttttactccttgaaccaatgcatggccagcttcccttctcttcctttagtaaatttccacttccaaccataagatctagagagaggctacaagacagaccatgctgcgagttgggaaagggcaagcttgacccgggcgagattcctctgtctgggtttatgcctcctacgtaaactgcaccagtactgctgccctggatgaagagaagaggatttctaaagcccccacaggtgctccttgcacactccttgctcttcttgaatggggaaggagtccttattgccttaaaattgttagctttgtcttcattttgagatccaaatccaatattcctacgaaggaaaaaaaagcatcccagtggcatgcatttcaaaagtttatcttaattcacaagatttgccatttttcagcacatccgaaaactgcttcttggtctgtttccatttcatgcagtaattcagatttagattcactttttaccctacacaaaatgttgagatttccgccattaatacatttacaaggcaacactttaaagacattagatttcttgtagtgggttgaatgatgacagaagatatgtccatgtcctaatccctagaaatagtgaatgtggtgttatttgaaaaagggtctttgcaaatgtaattgagttaagaatatcaagttaagatcaccctggattattcaggtaggccctaaatccaatgacaactgttcttttttttttttttttttttttttttttttttttttttgttgagacggagtctcgttctgtcgcccaggcgggagtgctgtggcgcgatctccgctcactgcaagctccgccttccgggttcacgccattctcctgcctcagcctcccgagtagctgggactacaggcgcccgccactgcgcccggctaattttttgtatttttagtagagacggggtttcaccgtggtctcgatctcctgacctcgtgatccgcccgcctcggcctcccaaagtgctgggattacaggcgtgagccaccgcgcccggccgacaactgttcttttaagaaacacacggatgaggctgggcacattggctcatgcctgtaatcccagcactttgggaggctgaggcgggcgaatcacctgaggtcaggagttcgagactagcctggccaacatggtgaaaccctgtctttactaaaaatacaaaaattagccaggcatggtgatgcacacctgtaatcacagctactcgggaggctgaggcaggagaatcgcttgaacctgggaggtggaggttgctgtgagccactgcactccagcctgggtaacatagtgagactctgtctcaggaaaaaaaaaaaaaaaaaaaaagaagcacacagatgagaaggccatctaaagacagcggggtagaggttgcaattatgcagccacatccaagggatgcctggagccaccggaggctggaaaagatgaggaaggatcctcccctagaacgttcagagggaacatggccctgctgacaccttaatttcagacttctggcctctaggggtataaagaaaatacatttttgtcaagccaccaagtttgtttgctacggcaaccctaggaaagtagtatctcctaaaggtgatatttctaaatagctacaaccaaaccttgattgtttttatagaagggcacattgtcaaccaataccatttgaatatggtattgatatggttctaatattttaatactttttggaatattttaagtttaaatcgtgacacagtgtatatacaaacacacactttttttttttatcatttaatgaacacctgagtatccacaatttacccgctattagagtaggacatgttggtgaataatagacaaatactttccaatagaaattgattatctgttagataagactttttttctaattatattaatgtcttccctcatcacgctggcatgtgtaaaagtaacatagtgggatggcagacatgatctctaaattggataatttaccagggaaatcagggtgacgaaagagaaatttgtatttcttatcgtctgttttgaggtaatgcgttgtctaacaataaatcacaagtgtctcccacatttattaaaaagtctgtgacctaatatgtcccattaaggcacttataagcatgtgctacatggcacaacatgatgcttagtgacaatggaagcgacaaaatggaactttctcttttcttcggatgccctagttttaaatcacagactccatttttaagaggcaaattattcctccttgaacaatgtcaccatcagtaaactcttttcttccaatccttgacacacatacataccacctaaattagaaagcagctttattaataaaataatctgttgtcaaatcagcaatgtttgagtccaccacaggggggcagcatcggcaaacatagactctcctctgagagggtgggcaaaatagtgtgattggttttctcaacttgcagtcacctctttccctttctttccaaaatgcacacatctactttccaaaatagaccgcaactatttctattgatctggaagaagcttgtaccaggcaacccatttaggagaagttggatgaagagggagagggagatgctactcatcacatcaatgttggtcttatggatgcaattgtcacgtgagtttgagacgtccctgactgcttccagagaataaatccaacaggatagagaagtatctgcaggcagggaatggactttctgtttgagaaacaagagttaagacaaagggagagaaacagagagaaagagacagaatggataaaggttgagggagatgggaagggagacgtggacagaaaggggaaaaaagaaaagaggagtgagagagacctgcgtagctcaggagctaaatatctaatctgattttatgtgatgcttcccattgtctttctaaacagaggtgaatggacaacaggtaatgcaaattcctcagtaccagcatgtacaagaaggagaggacttcaccacgtactgcaattcctcaactactttaagcaatatacagtggtataagcaaaggcctggtggacatcccgtttttttgatacagttagtgaagagtggagaagtgaagaagcagaaaagactgacatttcagtttggagaagcaaaaaagaacagctccctgcacatcacagccacccagactacagatgtaggaacctacttctgtgcagggcacagtgctccccaagcacctgctgcctgtctccaaatcttgccctgggtcttcaggagcagatcatcctactctccccaaagagcaggcgccagagaaagccaaagtcacaatgtctgtgaggatctcgagcaactcctccccatggcagtaggaatgcatgtagaaattcactctgttaagacctggaagagtttagcagttttagttcctaaaacttaactaccggttttcttctacacaggtgtctcaaagaattctaattgtcttaggaagaatcggtggattttaacgaattgtgatacagatatttatataaaaagtcatctttcagtgcagtggtccccaacatttttggcatcagggaccggttttgttgaagacaatttttccacggagagggtggggtgatggtttcgggatgaaactgtttacctcagattatcaggaattagttagattatcttaaggagcgagcagcctagatccctcgcatgcgcggttcgcaatagggttcgggctcctatgagaatctaatgccactgctgatctcacaggaggcggagctctggcagtaatgctcacctgccgctcacttcctgctctgcggccaggttcctaacaggccacagaatggtacagattccctgccgccaggggtttgggacccctgtttgggtggtagcagaggtttccaagcagtttctttaaggttttagctcaattgtattgcggaagatttgaaaattaaacatttttcattatgtacacaaaacttaaaagaagtttacgaccaactccctgaagagtcacctctgtagaactcatctgcttcaatgcaacgcagtccaacatagcataaagattatgcaggcggtaaccacctttccagagaactgagtgaaaagagctctttttaaaatgaggagtttagacgaaactggaaggtgacccatgaagagatttaggcatggtctctttttcactcttccaactgcaattatattcgccaagcccagatgaagctgatgattcaagttccgttagccatgttcattggtctaactacggggaaaagtcagccatagatttcaaagtgtgttcactgacttgaccaattactttatttctcagtacttacaaagatttttatcttgggaaagagaggataaaaatacaactgtattggagagtttaaacattaaaatcaactgagattggtcagctaaatggtcaaataaagtttttgcacctttttaataaaaagttttgtagccataaaattattgtgatgaaaattttgtaacataggaattaagttaatttatcaaatgaacaaagtcaaatacaaaatagtactatgccacttataaaacaaaataacatatgtatatagaaaaatatggatgggagcacacgcatgtttaggttaatttctaagagcaccgtaattatttagtagttgttttcatccattataacatttccaaggctatttcagagttgtgccaaaaacagttatgttaaaattattgtaaaaattattttctcctcttctgtcatagccttggcccttttgcacacggatcctctcaaactgacctttttttcgggggaggggaggggaaggtgggtctttctcccacaaagttttccttcctttctctttttttctttcatacgttttctgtgtttttctgctacaatcatgccaaagtacaaaataatactaattaacaaaatcacaagcactagaaaacagacatgaattataaaaggcctcataaataattctggaaagatcaaaaagtgacctttacagccagtaggggagtgaattcatccatcaaaacagctgccagagatgattcacatcagaagtaaaaaaacaaaaaacaaaaaacaaaaaccacaaacaccaccttaccagtataattaggatctcgttttgattctttaccaaatttaaggagagtatggtctgatatttcttggtttccctcactgattgtttctcttttcttcccagtgtatcttttattaagcacacatgaggggctgtcatcctttgattctccaatattttctgtctgggagaccccatgtacagaaacaaggggtggactgacagtttcaatttgactctagtgtcaaattgaagtgtttggctacttcctccaaaatctttcttcataggattttttttttgaaggttttctcaaagactacacctaactactgtacaaaaacacatcagtagagtctgcttaaaagacctccttcaaggtttcagtgagcatagatcgcaccactgcactccagcctgggtgacagagtgagactccatctcaaaatataaaatgaaataaaataaaaataaaaataaaaataaaataaaagacctccttcagaaggcattaatcatgtctttcttcctttttatctctctttctttccttccttccttccttcctttcttttttttctttctttttttttgtcacatccaatctgtatctccatgctgtctagagtgattagagtgattctctatcctttacagcaatggggcgcattagtccacatctctgtttttcttgctcactcacaggagataagattaaaaacaggtaaggataatattgttttatgaagcaggtattataatttcaaacttataaagaaagaaattgaaacctcaagatattaagtaacttacatctactcacttataagaatggataaagttcaaatatatgagaatatcagtactggttaggctacacatcagctggaactctcatacattgctgataggaaagagaaatgatcagcactttgtaaaacaggttggcagttcttacaaagttaaacttcacttacaatatgattcatcaatccctctcctacgtatttagccaagagaaataaaagttatgttcgcataaaaatttccatgtgaatgtttacagaagcttaattcataattactaaaacctgggaacgatcagatgtccttcacctggagaatggttaaacacattgtggttcatccatatgattgagtactactcagcaacaaaaagaaatgaaatattgactcatgcaacaacatggatgaatcttcaacgtgtcttggtaaataaaagaaactaagtctaaaggactacatattgtgtgagtttatttatattattaatacatatgggtagaagcaaaactataaagataggaaacagatcaaagggttggtgagaactgtaccatagacctgtataccgcaaaaagtaaatcttactgtgtataaattttttaataattagaatgtgagtggaaccccaaaagaaatagaaagtgtaacaaatgcttccaacaatattatagtgaataatgtaaacacagtgacactgtctttaatgtggaagaaaataactaacctaaataatttttgaaaacagtattttgaatagatattgtaagactaaaggcaaaagaatggcacacaaataccattctgtagttaataaatttgtttctcaaggggtataggctagcaattcttaaagtaatttatgtgagcatttggattgaacaaatgtgtataagtaaaatatataatagatcatagatcatgagagccagatttctcactgttgggaaaagtaataaataatgaagggagaaatctatgcagacccagtggagttgaactcatatttttttaaacattcatacatataggttgatacataaataaaattattaggagacttgagtgctttctgatgcccaacagcaaaggacaagcctgtggttactttattcaaattgattcaaaagcctgaaagactttcagcaaagtagataagaaatgtctgggaaacctaggtggtcttaatattaggaaagataacagaatttgtgttgtcaccatatttagttctgtcagcgtatctctttggtttttgtattgaggtataatatgcatatagtaaagtgcatgaacattcatcaaatgtttgtgaacgttttagttatgcacttacctgtgtaataatcctccaccaatcaagatgcagaatatttccaccaacccagaaattatttcattcctcttttcaatcaatacccacctctagagataaccactattttgatttctattgccttagattagttttgctttctcttgaatttcatattaatgaaatcatgcattacattttatatgtttcttatgttgaatactgttccattgtatgaatatgtcatcttgtttatctacttctctggtaatagaaatttgtgttgtttccagtttggggctatgatgaatacaactgctataaatgttcttatgtaagtctttttgtggacatgtgaaattgttgaaccttcttatataacttttattgttgtagtagaatctctgggtcataggacaggcgtatctttaaccttattagaaacttccaaggcatttttgaggttatatcattatggaaaggagtttcaattctccataaccttgctagtacttaatattgttgacatgtatttttaaactttttaattttgagattattataaattcacatatattttaaaaaattaagacagatcatatgtatcctttactcagtttactccagtggtgtaaaactatagtacaatatcacaaccaggatattgacgttgactcagtcaaggcacagaacatttctatcaccgcgaggatgctttctattgtccttttgtagccatattcatttcctctctgctcccatcccctccttcatccctaggaactattaatctgtccttcatttgtataattttgtaattccatatatgttatataaatgacctttggggattgactttttaaactcagcataccgctgtattttgtgtcttgccaaactcgagaagtttttggcttttacttctttgatactttttcagccctgccccttttcctttttagtgctctgatgaaaggaatgttagatattttgttatagtcctgcaattccctgaggcttggttcatttttttaatcattctattttccctttgttattcagattgagtaatttcttctgttctaccttccagttcactaataattttctctgtccactccattttgctattgagcccatctggtggactttctatttcagctacatttttaagttctaaaatttccattttatatcttggttcttttttatgtatcttacttctttgctgagatttctatttccacctgaagctttctgtttctttatttgtttccagcatgtctgtagttgcccttcgaaacattttcatcatggctgctttaatatctttgtcaggtaattttaccatcgctttcatctcagggttggcatctattgatcgtctctttaaaattctgtttgagatcttcttggttctgagtatattgagtgattttttttattgaaatctgaacatttgagtattgtgtttgaaactctggatcttatttaaaatttttgtttttcctccttttctctgatgccactccagcaggggaaggggaacaccgccttactacctggtagagatagaatccagggtccccattcagcctcattgacatcagagggcagggaggatcgtcaaactgccaggtgggggttggacttctgggtccctatgtacagatgagtcttgaaaaacatgagggtttggggcaccaacccccaagcattcaaaaatttgtatacaacttttggctcccccaaaacttaactactgataacctactgttgactagaagccttactgataacataaaaaatcaattaacacatattttatatgttatatgtactatataccacattcttacaataaagtaaactagagaaaagtaaatgattttaagagaatcataagaaagaaaaaaatatgtttacagtaccatactgtatatagcagttctgtaagtttatgtagtctgttcacaagatgaatcatctgtctgaaattgcaggcaactccaattgcagctgcagcttaatatcaagcaataaagttttttcttgtaaggtcatgacttttctctgcttcttgggcgcacttccagcatcactagtggaattttgtatggattccatggtgttattcaaggtttacactattgcactaaacacagcaaaaagtatgggagatcggtgagagatgactttttactgcaatgcgcaaatggctagagagatgaactgctcatgtggagagaattagcattgcattttaagtaggtattcacaaacttgagctcactgcaacagcaacagaaggtggctacaaaattattacagtagtatagtatgtactatagttaattttatgcagttgtgatttaatactgcatctttaagtttgtttgcatttctctggactccaagtgccgccacatacactctgtgtttatgtgcttaagttttgatacatttaaaatttttataataaatttgtgtatgttttatggtagtaagtgataaaatagactagtatttacatgcattttacacattcatgacatatctttttcttaattttattgatatttttagactacgttgtgtgtttgcaagtttttttcaactttttgcaaatctccaaaaatttttccaatatatttattgaaaaaaagttcgcatataggtggacccatacaggtcaaacttgttcaagggtcaactgtagtctccactgtaatttatttttctttctttatggttagggttttttgtgcacttttaaagatattgctgtccacttctaatataatacagttgttctcctgtgtcttcttttaaaactttatagcttcacccttcacatttagatgtctgacccatctggaatgtgtgtgtgtgtgtgtgtctgtgtctgtgtgtgtgtgtgtctgtgtgtgtctgtgtgtgtgtgtttatatatgattaaacaattactttggcatctatattgaaaagaccatttcttccccactgaactgcattggcacctttggagaaaatcaagtgattacatatgtgttcatctatttctgggcatgattctgttaaatcatctttttaacaattctcataccaatagaccattttctcttaattattgaagtttcacataagtcttgaaatctggaaatgcaattcctccaactatcccccacctttttcttcaagattgtctagcttgctataggatttaaatttccatagaaattgcaaaacagattctcaaacttctaccacaacaaatttctagtaatttgattcaaatttgctgagtttatgatcaggttgagaaaattgataatttaaatatggattccttagatttataaatatagctcttcatttatttaggtcctctctaattccttttattaatgttttataattttcattttaatgaactttcatatccttaattaaattcattcatttatttcattgtaaatggcatttttattttattttccaattgtttttagctagaatctagaaatacaatggaattttttattcaatgactgtgcaattcatccattagttctagtagtttctttacagatccttttaaatttttttatattcaaattatgttatctatgcagaagaagaattttacttattcctttcccaaatgtatgcattttattttctttcctgacttgatgccagttattccaatgcgataataaatggaagtgtgataatgtatcttgttcctaacctcagagaaaaaatgtttagtattttaccattaattacaatgttagccttggatatttttatagataccttttatcagattaaggactcttttctacatttctagattgttgagagtattcatcatgtgagggtattggccttgtatcaaattctcttgtgtgtgtaagttttgataaatttaaacttttaataatagatttgtatatattttatggtggtaaatcataaagaagttaaaataagttgaactcattattttggtttttcatcaagcaaaggaggagaaaaccttacccattatgatcttagagatcatgtaatcttctaaaatgtaagatactctgcgaatactcagtagattggacaaatacattttttattctttagagctatgcaaaatacttaatggtttttcaataccattaaaaaatcacctgttagtggcctcaattgtcttccaaaaaataaaggcgaacaaaccaaaagcaaaaaaggaaattgcattaattacttttcttctgcctttgttaatgtaacaacatgatatagtcctccctactttcagtaattgcttgtttcttcttatattttcggcagtactgtcctgttaacttacatctttgtgatctggtacagagtaggctcttagtgaatattttttaaatgaatggaatattattactatgacttttactctatatctttgtagcttgatttttcacacccgtgttggggaaatttattgtctatcattgaatttttgcctacaaatctgaccctgtgtttaccccattgtagtcttttgttcaaattctattccagaaaactgaaagagtgcacagacaataatttaaagatttgctcagcataagttctctcagtaaatttgtcagttatgactcatctacgcattcatgaaacaagtaattattgagtgcttattctgtgccaatatctcttttttttttttttttttgagacagagtcttgctctgtcgcccaggctggagtgcaatggcacaatctcagctcactgcaacctccgcctcccgggttcaagcaattctcctgcctcagcctcccaagtagctgggacaacaggcacttgccaccatgcccggctaattttttgtatttttagtagagacagggtttcaccgtgttagccaggatggtctcaatctcctgacctcatgatccgcccgcctcggcctcccaaagtgctgggattacaggcgtgagccaccatgcccggccgccaatatctcttataaacattgaatagtatgggcttttgaactagcctttaattatgggaatattagaaacaaaagaaaaattaactccaagtcagcaattgagaattataatgggaatattattgaaataacaaagtaatttaaaaaatagttaaaacctttcttggagtgttagaggactgataaaacaaagatgagtacagaggtattaaaactaagatacctaccttcaaacctgataaaagagtcagaagattgctggctgactttttgcctgattatagctacacagttcattcagtcagtcagtcacaagagggggctgcttcaccttaaaactcaggtttctttcttgcagaagggacgctaagcttatgttttccactaaagttccacagaaaacaggaaaaaaaatgatacacttttatcctctttagacaaattgtactttatgatctcttattaagtgtgttatggcttcaaaagttctggggcccttacactgatggactaagtcttttcagagcacctcccttaacactgctttctccaagtttcacttccctaatcatctcttacctcccctattccttacacctttttcttcctttcctttacctattcttaccaccgtcaccccaaacttctttgcttttcctggtctcttttctttccgcctcagtgtccttggtgcacacagtaggcataagcacgggcatagaaattaggaaatgaacatgaaggccatgagtttaaggaggatgagagccagcaccatttatgtcattagtcactatatcaagaacagatatattgagaaatggctacttagacaacagtcaacacatgattccagggacctctatagaaaacccgagtttggggagacttagctttcagtgtcaatgttatcaatttttattttccccctgagcacatcacttcctacttttgaacttcacttccgttttctagaatgtagatgggaatttccaactccttacaacacagagctcactataggcttctgggatttaatgacactttccacaagctccatggagcagaggaaactttatttggtacattgaggaagaaatgatggaagaaaaggtctggatagatacatccttatgatcagttttcctcattctgtgccagcctcttagactttaaacctcataaatgatttcagtagacaccccctgagttgaggatgtctggttgatatcctcaccgtcttctcaggaacatgactaaacctggggaggaagacatagaaaagcaactgctctatcattggctgacaagatcctgacaacaacacaatgagagctgcactccttgcaagtctttactagtagctgttgcttctgttctctggaaattctttaaacctagaatcagacacaaaaactgaactctgggtccacaatcctcatttgtccttgaagtatgaggctggtggcaagagtaactgtgtttctgacctttggtaagtgctctgtgtctacctagggagggcttctgaggacaagggaccccgaagggtggtttgccctctatgctccctgtgctttatccagcatactagatatgactgagaactgttctgtgcatttgtctaggaagtacatacatctacataccaggctagatcataaccataatcccagaagagcccttggcagtattcagttttaagaaatctatgggtttactaaatcaagctcccatggaatacagcctagagggtctctgattattggcatgtatctttggtctttataattaacagcaatgatattttttgtgttcttgcaggacataaaagttttggagtgttaagggagtgttgtatccttgatccatagaattgcattggtttgagagtcaggagctaatctgattttcttgaccccttaggaactataattgatgctaagaccacccagcccacctccatggattgcgctgaaggaagagctgcaaacctgccttgtaatcactctaccatcagtggaaatgagtatgtgtattggtatcgacagattcactcccaggggccacagtatatcattcatggtctaaaaaacaatgaaaccaatgaaatggcctctctgatcatcacagaagacagaaagtccagcaccttgatcctgccccacgctacgctgagagacactgctgtgtactattgcatcgtcagagtcgcacactgggacagatggggctgcacctgtgcaatatctccctggtggcaagtgaggaggagggtagcattcacctagagcaaaatgtcgataggagtcaaaaagtaacaagaaaagaggaaaaggaagggaaggagagaaggaggaaaataggtaaagtaaataagggagatacgatgaagggtaaaaagataagaataagaactttattgttgatgcggctgagaaaaatgataaagaggctgtgaatcataatttgaacatagcaataaaatgaagagggttaagaattttcaagactcttcttcatgtcaaaaaaaaatcatttcagtttgttagtaaaaatgaatggataaggaaaatcaaaataattctgcttgtcccaaaggcttttttcgtctggatccaggggcaagtccaagctttgaaatgcatgctgttatagttgttccaattaccagaaacaagttgatgtttctgcaagaaaaatctgaaatgttctttcttactagtgcagtaacatcagttactagagcatgcatatttgtgatgaaggtttttctttttggaaagaaacaaaaatcaaatgaatattaatttgtttttatttttcttgaagtcttgaatctttaaatagtcttcatcacgttttatttcctaagcagcacacaaatccatcttaccataaaagactcagataaagcaaaagtgaaagacctagctgcatttcctcattcttccctatctcacaacactcttttcaaagaacactagctttgacagtttaaggtataccatgatagccagtttaatttcagttatctatgtttgcatataactttatgcaatcacacacaaacttacatacatacacacagttttgtcatgtaaattggatttattagattttttaacttgccatttatttttcatttaataaattgtcctagagatctttctatatcaatagagaagttcactttattctttttggtgcttatttagtactttgagacattccatcatataattgcttttctcttgatgcatatttgttcctattgcctcactgtcataaagaacattgtgttctacatctttacagattcaccttagtttgtgtgtatgtggaagtgtttattttaatgagatttctgaaactgaaattactatgtcaaagggaagttgcatttaaaatttttggagaaagtggcaatttgccctccaaaggatgtaactacactccatataatacatatatatgtattattatacacataatgtatccattataactattatataattaataaatataatacatataatgtgttaaatagcttccaaccaacagtaggtgaaagaactcattttacatttttataaaaattgaattgagaattactaacggcttttatttttattttacttaattattctatttatttattttgagtctgggtctcactcttgtcacccaggctggagtgcagtggccggatctcggttcactgcaaccttcacctccaaaactcaagcaatcctcccacctcagcctcctgactagctgggactacaggtacacaccatcactcctggctactttttgtagagacaggatcttgccatgttgcccagtctggtctcaaactcctgagctcaagagatctgccagccttggcctctcagagtgctgggattataggtgtgagccaccgcacccagcccagtttttaataatccaaagatatattatctttagtcattttcctgattcatagtgtttttgagcaacttttttctacatgtattggcactttttcatttggcaatatgcttattcctaccttttgaatatttttctatttagttgtcctcttttctctttttattcgtaagaattagtttcatgccttaaataatacattatttgtatgaatattttattctaacattacctttttattgcttatttctaatataattttaaatttttacatattttaacctatcaagtattcctttcctttaggccttgaaggtcaatatctttacaggaaatccctaagtatatcacatattttaatatttattaccatttggttgagaattattttgagatgtatgttacagattagaaaactgagtctcaaagagatttaaaaacctgctaatattcacagtattaataagtgagcatcaagtttaaatttatttttaaacctgagattgtctaacactaaaatctgaacacacattgtttaacctcatcttactggaagcaatcataagaagaaaaccccaaaataatgaatcaaataaagcatcagtggaatggattatagtagccatctaagacacatgttagagcaaaaggtccggaatgttagggtagaaattgcgagttatgagttgagaaagtcaatggtccttaatcttatagaaaggtaatgttagtaccccaaacattcaaatagcagccaaaatgggtgttttgattgtggaagaactctaacgcatcctcagctctttattagccatatgtttcccaggcagaatggatattgaagaaattagaacataaagcaaaggaagtaggaaagaggagtttgatcctggatctgagtggcttccaattattctaggaaacttcacacagattgaggaatttttctggtccatagaatgggtagataaatgtaaattactatgatgatcatacttggaaattgctttgattccatgagtgaaagataagggaacagatatctacacacaaatcttagaaagtgcactgagatgtgctggtagcagtttccaaagattgacatatcactttcaacgtccttacagtcactttattcacactccttttctctttcacacagtctttaatctcatttaccttttgtttaacaccatcctctactctcctgtatttgaacacacaaatgtttgaggcctgtatttttggtttttattcactgaagcatcctctgtatctaggacagtgcctggcaaatagtaagtacttagaaaatatttactgaacaaatatatttatttataattgaaaatttttactggcaaatactaaggatgcaataaaatactagggacatgagttagattcgctatgaggatacatgagccattcagtgagaagcccgaactcatcaactttaaagaccattaatttgaatcccctttagccattaactcccatagccaccatctagacaggtcttatgataatgttctgctccacctctgaaatcttacctgcagtctaaaacctcccaccctgagattctcaccctcagttactctcactgtacttgttctttgactatatttggttatttagtcccttgacacctttcttttcttttttttttttttatttaacttttgttttaagttcaggggtattgaacttaaaataggtttgttatacaggtaaacttgtgtaggtttgttatataggtaattctgtgtcatgggggtttcttatacagattattttgtcatccaggcattaaacctagtacttatttgttatttttcctgatcctattcctgctcccaccctccaccctcaagtaggccccagtgtgtgtttttccctctttgtgtccatgagttctcatcacttcattcccacttataaaagagaatgtgcagtatttggttttctgttcctgtgttagtttgctgagaataatggcctccagttccacccatgttcctgtaaaggacataatctcatttctttttatggctgtgtaggattccatggtgtatatattaccacattttctttatccagtctttgatgggcatttaggtcgattccatgtctttgctattgtgcacagtgctgcactgaacatacacatccatgtgtctttatgatagaatgacttatattcctttgagtatatacccagaaatggtattgctgggtcaaatggtatttctgtttttcaatcttcaaggaattggcatactgtcttccacagtggttgaactaatttacattcccaccaacagtatataagtgttcctttttctctgcaacattgctagcatctgttgttttttgactttttactcatagccattctgactggtgtgagatggaatctctttgtggttttattttgcatttctctaacgatcagtgaagttgagctttttttcgtattattgttgactgcatgtataagacatacatgtaagacatacatgcagccaacaataataacttcttttgaaaagtgtctgttcgtgtcctttgctcactttttgttggggttttttcttcttgtaaatttgtttaagttccttatagatgctgaatattagacttttgtctgatgcatagttcgcaaacattttcttccattctgtaggttgtctgttcactctgtagatagtttcttttgctgtttagaagctgtttagtttaattagatcccatttgtcaatttttgcttttgttgcaattgcatttagtgtcttcgtcatgaaatttttgcccatttctatgtccagaatggtattgctaagttgtcttctaaggtttttatacttttgggttttacatttaagtctttaatccatcttgacttagtttttgtagacagtgtaaggaaggggtcccatttcaatcttctgatttgtctagtcagttatcccaacaccatttgttgaatagggaatcctttccccattgcttgtttttgtcagctttgtcaaagatcagatagttgtagatgggcagccttattcctgagttccctattctgttccattggtctatgtgtatatttttgtaccagtgccatgctgttttggttactgtagccttgtagtatagtttgaaggtggggcatatgatgcctccagctttgttcccctttattttcaccttatttctcagaagcttcttatcttttattttcttacctataatgcttatactctattacctgttgctttcaatctttagtcattgactatattattctcatcccaattctgcatcatagcagtgatctaattaattcccaatcatgaatctgtatcttccttattgtaatgcatatcttgtctgatcagagtacaccgatgcgcagattggtgtcattaaaacatactgttaccagccgggagcaggggctcatgcttgtaatcccagcactttgggaggccaaggtgggtggatcacttgaggccaggaatttgagaccagccaggccaacacagcaaaaccctgtctctactaaaaatacaaaaaaattagccgggcatggtggcacacatctgtaatcccagctattcgggaggctgaggcaggagaattgcttgaacctggaagacagaggttgcagtgagctgagatcatgccactgcactccagcctagacaacagagtgtgactctgtctcaaataaataaataaataaataaataaataaataaataaatgttgttaccttcaaaattaactaggcccacaatgtttccaggaaagtattcttctctgtaatcacatctcactgccattttctaaaacttctcacatacctcagacttcctaacccagatcctcctccattcactctcttgggagacatttaatctctgtgtataacaagaaaaaaaatcccattagaaggtaataggtgtttcactttctaccttcacactccaaagtatcacttaaatctaaactactgtaatccttttctccttcatttcaataaaattgaaaataactgtttttcctcctaccaaaactttgtccttctacccataatccacattccaatcccatctgtctcctcaaaactttgatccattgtttatacattctttccaaaagcatgtaaatataccctaatttgtataaaccctaccattacctcttcaacatcctcatccagttaacaccatgactcttttctcctctttagaggatccagcaacctctagaaggagatttctatattcaaattttttcttccttgtctcatcacaatgcctcttcccatagcagttgaccttttgctgaaaagaccaaaatcatgatttttgtgttgttaaaaaaatcagtagttcagtagcacagtatggtgactatagttatcaataatttattgtatatttcaaaatagctagatttggaatgttgtcaacacaaggaaataataaatgtttgaagcaatggttaactcaattaccatgatttgataattacatgttgtatgtatgtatcaaaatgtcacatgcatttcataaatatgtacaattattacgcatcaataaaaaatcaatagacattgaaaagttatcatcttatagacatttatttaccactcactctgttagccattcatttctttttagaattcctttttccttctcttttagaaatccagccatttctgatttgccacttacctctctggataccctttgaggtttccttttctttttcttttttttttttctgagatggagtctcactctgtcacccaggctggagtgcagtggcacgatattggctcactacaacctccgcctcccaggttcaagcgattctcatgtcccagcctcccaagtaactgggactacaggcacaagccaccatgcccagctaattatttgtatttttagtagagatgggatttcaccatgttgaccaggctggtcttgacttcctggcctcagatgatcttcccacctcagcctcccaaagggctggaattacaggcgtgagccaccacgcccagcttcaaggtttctttagtactttttccactatctatcccatcagtgtttgggttccttgaggatttttttaagtccctattctcttctaaattttgctctaagcatttgtcttggtaaaattgcatctagtcttatagggtagtactacgtcacagataacatagtgggcaaggaactgagcttgcagtggaaaagaattggattctaatccttgcatgtccttggacaaatgacttaacttcataaggacttgatttcccgtctgttcagtatagataagatctactgtaaagggctatagtgtaaaatgtgcaatagttatcagtggtcaataatgtggattattaaatcatattgatgagacaaactccaattctgttgagatagcagatcagccagacttgttttctgagcactggtcacaagaccctgctgaacaaaacaggagctgatcaaaacagaatgcagcaaagagagtggccaaaaccagctaaaaccaagatggagatgaaagtgacctctgattggccccactgctcattatacactaattataatacatttgcatgctaagtgaaactcccaccaccaccatgacagtttacaaatgccatgacaatccccagaagttaccttatatggcttaaaaggggaggaaccctcagtttagggttccttttccaggtaattcatgaatttatttattatttagaatataatcaaaaaatagccatatatatagctagccaacaatccacaagggctgtaactgctgctgctattactctgtctatggagcaaccactttcctgtactctgtagctccaatacacttgccttcactttgctctgtcagctcactcatgaattctttcctgtgtgaagccaggaaacctgctgggctggttttggggatcacctacctcactatcacttactatgacttggacaaattgaatcttttcttccatgctttagtttccccgtttataaaatgacgatgataatagtatttacttcataggattaaataatattatttactttataagattaaaatagcttcctcataagcagacccctgaaaacactgtcatcagattattctgctaagaaattcaaaccaaggaaatggagcccaaacccaaaagactcagtgtgtttccacatttgacctccagggggcaatgtctcacagaccggaaatgtctctgctaagaagagttctgtccttcctgagcggctttatctcacagctcactgaggtgcatattctgagtaggatcaacaccagagtggttgttgtcaagagagcagctcttactagtggtctctaggccttacctaagcagggaactcttgaatcccagattttcctcattatagggactcaccatcctctggcacattccttcccactcaggagatcttctagaatagagctctcagcttcctcactgcctagccatgctcttagtggtcattctgctgcttggaatgttcttcacactgagtaagtataataatattgtttccctgctcccgtctccatacaaggaacattgttccaatcggaatctaaatagagactctgtctcattacaggtagatctgttctggtctcactaacagagtgttgatgttgcaggaggaaccagaacccagtcggtgacccagcttgatggccacatcactgtctctgaagaagcccctctggaactgaagtgcaactattcctatagtggagttccttctctcttctggtatgtccaatactctagccaaagcctccagcttctcctcaaagacctaacaaaggccacccaggttaaaggcatcagaggttttgaggctgaatttaagaagagcgaaacctccttctacctgaggaaaccatcaacccatgtgagtgatgctgctgagtacttctgtgctgtgggtgacaggaggactgtgcctgggactgcaggaggagctgaacacaaacttcctgagacactgaggttttcaggaactcaagggcacagcctgacctatttgtagcaaggtctctcatttgatgaaagtgagaaaggtggaagaacagagccatgaggagtgcttgactccagagaagaaacagagacttcatcacgttccttcttttactactgggtcacatcagacaagatgtggaagagacagacttctatgactgttctccttctgcttggaaataccacactgaagagggtcaagtttttttttattatactttaagttttagggtacatgtgcaagattttaaattagtgtgaccagtactggactcctgatcctctccttctcactgccaacatgctgcttctattaccttttgtttttcaatcgacagcatctcattctttcagaatctgcccatagcctcagagttatttttgactcttattttttctttcactattcacattgaatccatcaagaaattcagttggccctaactaaaagatcgacccatagtttgaccactgctatctctttggtcaagccaccctcatctcaatgaattaccgtagtagccttccaaatggtttccctgcttgtcctcctacagaacattcttaatacagcagccaatgagatctttcaaatatagataggtcactcatctactccaatccttgcaatagcttcccatttctcttagagtaacatcaaagtacttacagtgacctagaggaatgcatgatgtatctctcgttacatttttaaaacaccaacagaaaaataactttggcaaccctgaattctataccagtaaaaatatcacaaagaaattatagtaaagacattctcgaaaggaaaactgagagaattcgttgtgagcagacctgctataaacgaagtcctaaaggaagttattcaggctgaagggaaaggataccagaggaaaatttgcaacttcaaatacgaaggaagaacaacagaaatagtaaatagatgataagatacaagaaactagtttccatttctcttttacagtcagctttactgaggtataagttatatacaaaaactatacatatttaatatatgcaatttgatgagtttggacatatgcatacaaccgtgaaaccatcatcacaatcaaggcaatagacatgtttgtcacctctaaaagtttccttgtgactctttgtttttgttgttattgctgctgctattgttgtaagaaaaattaacatgagatttaccctcaataaattttcaagtgctcaagcctgtattgttaactatggacactatgttgtatagcagatctttagaacttatttttacataactaaaactttaaaaccattgaacaacaactcccaatttctccctccccccagtccctggaaaccattattttattctctgcttctatgaatttgactattttagatacctcaaataagtgtaatcatgcattatttgttcatctgtgactgggttatttcacctagcataatctcctccaagttcaatcgtgttgtcacaaatggcaggatattcttctttttcaaggccgagtaatgtttaattgtatgaatataccacaatttatttatttatttgtcactaatctttcttttccatatcttgcatattgtaataccacatgcagaagaataaaattgaacaccatacgcaaaaacttactcaaaattaattaaagacttaaacatgatacctgaaagtgtgaaactactagatgaacacgtagagaaaaagcttcataatattggacatgacagtgatttattgggcatgacaccaaaagcacagacaacaaaagcaaaaaaagacccatgatattacatcaaactaaaaagcttctgtgcagcaatggagcaatttatggaaagggagaaatatttgcaaaccatatattgataagtggctaatatacaaaatatgcaaggaaccataaaactcagtaacaaaaaaaaacaagtttaaaatgggcaaaagactcaaatagacatttctcccaagaagacagacaaatagtgaacaagtatatgaaaaggtattcagtatcactaatcatcagggaaatgcaaatcaaaaccacaatgagatatcacctcacaaatgttaagatgaccattattttttaaaaagttaagtataggtgaggctgtggcaaaactgaaatccttgtacagtgtacagtgttcttgggaatgtaaaatggtgtagctgctatagaaaacattatggagttcctcaaaaaattttaaatagaactaccatataatccccaaaccctacctctgggtatatatccaagataattgaaatcaggatctcaaatagatatctgtattcccatgttaatttaagcattatacacaataatttctcttcttaatttatttaaaatgcatagactgttgaaataaaatgttataaaattccccgttggggttttcaaagtctaaagatggaaggcatctgagaactataacatgaagaaatgagggtaaagtaacctatatacaatttctatattgttcatgaagcagtataaataaatataaacagactgtgaaagattaagtagtaagcatagtagtagtaggcaatcctaatagaaaccactaaaaacataatacaaaaagaaatagtcaaaaatcaaatagatacattataacagaataataagagaccaaaacaaagggcagaagtggaaaatgaatactgaagtaatagacttaaatacaaccatattaatagttacattaaatgtaaatggtctaaacacagatatttaaagacagagattatcagtatggatttttttcttaaagaagacccatctacatatgaactgactttaaatacaatgacaaagattaaaagtaaaagaatggaaaaagagatccatgaaaacactaatcaaaagaaatctggaagggctatattaacatcagacaaatgggacttcagaaaaagaaatattaaagaaataaagtgaaatattacataattataaaagggttgcttcactaaaaaaatgtttaaagtgcttgtacctaccaacaaagcttcaaaatatttgaagctaaaatggttagaactaaaagaaaaatagacaaaaccgctattacacttggagacttaaaccctttgtgttcagtaaataatagaacaagtgttatagttagagaatcagcaaagatgcagcagacctgctcaacactattatattgacatttatggaacactccagtaaacaacagaaagaacataaagccatgcttagaagaaaatttataacagtaaacatttacattagaaaaagaaaaaaggctcaaatcaataattttatttcttccttctgtgtgtccccagtgatgatgtcctgcacagaaaaaaataatcctagcaatccaagaaactctgtttttgagttcaggcaaagaagagtattttctgctgttactgcaccaggtacccaactggaaaatgatatgtctcatattttatattgctctcctatgctcaaagattaaaatgagattaattctatttatatcacatgtcacagttctggaggaggttatgagccttcctattatagtaatgatatcagaaagggtacaagataagtttagtccttcatcttttaaaaaaatatatcagttatgaagattgttcgccacgaaatgaattccgttatatacattataaattatataggacattatagggtaccttacaatacatctgcgtattttcacacaaggtgagatatcactaattattaaatggaactatgccactatgtttttccttagcttttcaagggataagcacaagaatattcaagttatgcagtgggtcaagcctaagaacaaatgggaaagctgatagaataaagaaagactcaggctaggttctggactagctgggactaacatataataagtccataagtgcagaatgaactggatgtgaggagtgtgtaacccttctccatttcaacgtgcccaccttttgctttatttttcgctgaatgcctctcaatataacaatgtaacaacacactgacatctcatttaagtgtcagaagcattatggtacatgatagagggaacaatcagcttttctgtgtcctatttgatctttgacagtataaaaatctgacttttttcctgtgggcaggtatagagggcgtatatgataattttgtgtactttctgctcaatttttctgtaaacataaaactgctctaaaatagtctattaactttgaaaaatcaattttagtatagaagctaaaaagaaaaaagaaaaatcaatccaatgcgctcaatctcatagaaaatatttgctacaaccagttcggattatttcttactttcctgccttgtgtactctcttcaactttttgtgttggtgcttctttggtttgtgtatttactatgcagcatgcattatgtaaagttttgcatatattatataatttaagtatactaacatgaaagtagaaataacttctgttaggaaaagaaatataataagtaatttaaaagaaaaagtttatggattggatagggtgtgtagaactctcaactctgtcattatttgaattatagtagaaacgttaacaaacatcttaaatttcaattttatcatctgcttacaggagatcatcatgatcatcctgtcggcagttgttccaattatcgaataataaaatatctttcaagggcttagctcatattctagcacaatgtaaacatttaataaattattataggtaaagaaatggaggcccagaaaacataactaattttgctcataatcagaaacctagtgcattagagaaagaacactgagttttgaaatcctagctataaaatttaagccaaatatcttcaacttatgatatcactgatctattctcttgaatacatatattggaagtaaaagatgagcagctagagaaaagtagaggaaaagagagaaaccaggggaagcactttgaaaccaccaaacatgtattatctcttcagatattcaatcacacagataggcatactccttgatggccatttgtactagggctgcaggacttgataaaagagaacctacaacaacattctgtaaccttcaattgatttgttgccctagatctggtccgcatctctctacaaggttataaatgtaatgttgttttcagctgtttctccttgtattaatgaaatggaaaatcctttctcttctgtcctgacacagccctgattattaactggagtcacaatatttttctttctattgttatacaaactgtgtggaaagtattctctttattctcaagactatgatttaatccagttagtaagagggaagatcaagatagttagcttgatttttccattattcagtagatgggcctttatataaatgaagcgggagactggcagtttactcctatactgtgtgagcttcctttcattaagacctcggtgtcttacagcttctcatgactcttctctctcccactgtcaccttctatagcagcaggctctttcctggcagatcttaatgtgggaattaaaaaaggattgatgtgtccacatattaccacagacagattgatagggtcaggctagaaagaactatgtagaaaaactcggcgatagaagcaaaaggcagaatgggatgtacagctgagccagaaaatacaaggcaagaaaagataacagagatcgaatgcccataaatgtccttatttctgtgctagggctctgtgactgcaggtacaacagagaacacatgagatcctaaggaaagagtgtatgtacgggcgttggaggcctgtgagtaccatcagaacttcctgagtttcttccaaatgtcctttcttcagtaggtatatctctgaagcacctgtgtgttgaatgaagaattacctaaagggctgaatctttctcttcttaccttttctctagtcagtgccagactttagggcatgtgtcctctgggatcacagacctcattgaaaacaaatcccagtatcccagtatggcttccattctagtgggaatgggaaggcaggcccccgttgtgctcctctcctggggatgaatgttcactgaggttctgcagtacctctatgccatggctctcctttagtcctggaaacagcattcagactccagtccgtcatagcagtcactcaggatcttacagccagctcagcaacaaacaaaaacatagtctggggctcatagcatcccttccaaagactagattttctgatttcaggtacaagattcttgtgacaaatgacagaaacaatttgtcaattcttccgaacagaaggtccagcaacctgaacctcccagggtggaccagagagatgctgttgtatatgactatgctctgagagggatgagagtgacaaatgaggctgctaccgtgtgatagccctatgacaaaaatgaaaaggatggcagccttggaagccagttgaaggaaacatacataaaacacactagcaagaacagaatgcttactctttctttttgataagaaagcccatctgtcatatgcttccttggtctagggaccaggttacaataataatgatgataatgatattaaaatatatcatttaatatcattttcattagtaataaataaaaaagatcaagtaagtaagcacgaaattcaagtaattagaagaaagaaataaatctaaggaaatcatgaaaatggtacagataaatgtataagcataactaaattatgagaaaaaagaaaaaatagaattggacaattttttaaaaattgaatcatgaaaaaattagattaactcttcttttattgaagtaattattcaaaaaagagagaacctatgtaataggtattatacaggtgtatagatacatttatatatacattatatagttttctatcactttgttatcttaatttatgttttagtcctccgtgtgtttcttcttccttcacctgttttcaagcaggtggtgtctctgtgcttcaacatgtaagtgatgatgcctgggaatacagaaagctgtgtttgcctgtagagtcttctggcttgttttgaaaaatctaatttctttcaggaataatagggtttatggaagtgggagaggtggaaggaggttttttggtataaatagaagagagaatggcttttccaggagagaataaaggggtctgtgcgtcctgggcagcagggaacaggtcgttgtttcttgacaactctctgagaattagtaagacccaagagtgggatggctgtttgataattagaaagagttcccaggcttgcaaaagattttggggactccataaacctgaaaaacagaaatcttccacttagaatacacacctaacatgaatagttcataacatattggataagaaggctatgtttgtgattccactcacagaccatagtgataccatttatagttaaattggcttgtgagaacgattactaggcaaagaatagaacttgtcttggttgtctttataatcacatacacaggtctgtctctttgaagcattagatctcaacagttcttaagtttggatattgggctgggacagatgaagaagacctggggatccctcagttcagctctcatggcttcacattggatgtgagcacagaggctgtcaaagacttttcccaacaggctaagggatagggcaaacagtcacgctcattgtggattactcagaattccctatgagaaaggcataaaaaggttgtaaattcggtagtaatcctgaatttacaatcttatgcagttctgcccatcaacagggagcagacttcgtgatctctgcacgctaaagggggaaagaagatcaaagcttcttttcatgctttaacaggtattagcaaaattctgagaaggattgccaatatcctgttcataatgaatctaaactggagtgaaaaggaagaggtaagagctctccttactaataaggaggcagagcttcctccacccttcagtcttccagcctgaggctcagccacctacctctgtgtgctatgttcttttggcacctgcagcctgtccccagtggtgctgctgggcttatggctcccagtgtcaaggcagcaaacttattctcaacaggtgtatagggaaaggcaaactcagtgaatcaaatatttttaatattctgaaaaaatgatctggaaatacaaacatataacatttaataaatattatttataaatcatatgaaccattatcaacttctcttcctctgcctcagccatgtcagtaactcagttattctctcttatgtcttggcattatatgatactcgagattattcaagtgtatgcattggcctatagtagttgcttttctgtttctatcccctaaatattggttatattatcttattttttgctcctacatgaatgggacctacaatataagcagtccccacttacacacacacttgtgcttaaatctcaataatctcctactagtgaatgcagtgcaggtctctttaatttatggttacttttttccagtttcttccatttcaacaatgtgcacattttggtttttgtgccacctcacaatttttctttcctgactctttgtttccttgagaggatcaggcaagaggaaactgacttctctcatctatccatacccactctgtgatcttagataggcttcttcctctatcatatggagacaattttacctactctacctcttacaggattattctgaattatcttccaaaatgaagatttctttgcatcaaataatatagaactaggaaagaattatatatatgatgagatgagcctcattgtatgggtgaagtaaaatgtggactatttctgaaatggattgtatattaaattgcaatctggttagaggtttaaatcactaaagaggtagttattcatataaaactgacttagagttgctttgataaattaatcaggaacacagaccagttaattaatttatagcacctgttaacatccaaagaaattaaacctttcttctcaaaattaagctctaaccgtttacactatagtcattttaagtattttaggattatgggccaggcgcggtggctcacatctataatcccaacactttgggaggctgaggcaggtggatcacctgaggtcaggagttcgagaccggcctggccaacatggcaaaaccctgtctctactaaaaaatacaaaaattagccaggcatggcagtgggcacctgtaatcccagctactcaggaggctgaggcaggagaatcgcttgaacctgggaggcggaggttgtagtgagctgagattgtgtcactgcactccagcctgggcaacaaagcaagagcccatctcaaaaaaaaaagaaaaaaagaaagaattttaggattatgtaaagctactaattggcttacagaaactgactaaaataggaggtcttttccttggaaggaaaagatgtaataatctcagttttggataaaattgggtagaacagatttccctacggtggttaaagggataaaaacacaagatatccccagcatctacattacagacttcaatgaaggaagtaaaaatatctcaatagttgagttgaggaagtgggtcaaggatatgaatatccacagatgctgacaagggaaatatatgttatattcataaaattcaagtaattaagataggtaagtatacatgtccacttaggttagatgttaattcttaataagtaacataatgatctgaggctctttgtgtgccacttctacatctcaaactttgacgtggatcccctggagatcttgttaaagtacagattatgattcagtagggtctgaaattctgcatttctaataagctccaaggtcatattgaagccgctattctgctgagcaaggtttccactatctgagaggcagtattccacaggacctaagtgggtccactctttagccacactgcctagattagaagactggctctgcccgcttactaactatatgactatgggaagattaatgaacttctctgtgtctcagtttcttcatttgaaaaatgagaataatgttaacttcctccagtgatgttgtgaagaataaatgtgttgatttatatgaagtgtttagaaaagtcaacaacattgttaattgtacatattgtttgtcaagcttgccatatcaaaaatatctatgtgtttttgactactaaatacctatgtgtttttgattggtatttaattggctacttgtgtactagttgtttaaaaagggacaaggtgactaattattgagttttatgtagttgttacacttcttcacataacgcttgtcacagaacaatatagtcatatattctgggcatttttcactcaggatgagtgtggctgatgaggctgatgtattcttggatttttctaggtgatgattcatctgggctgggcctttcattagggcctgttgagaaagaattgaagtagtaaagctgagcttcagggaatcctctaaatagattggttgaaacacagtctggtttatatacataatctcaatgaagcctcaacacatccttgtggcataagtaatataagccccattcaacttattagaaaactattacaggcgtgggttaagtaaattgtttgatgtgacctagccagtaaatggcaatgatggagtattaatataagtatgtctgaatccagtatcaagtcatttaggcagaattcatcacttctctacgaaaagtgttaagtgttaaaaatatttctgaaagttttctcttgtatccaaacatttttatattcagtattctatttgtcctggtgatcctgagctcccttgaggacattggtggcactaaggggaggcttacacagaactggtgccttgaactcagtttcccctcaccacccttatcacactggaggctacccagggtggactcagagtggaaggagaattgtccatgtggaccacaggctctcaccgtggaatgattctggaggacttgatagtgtggctagaggttctattttaagctctgagaaatgtggaaaatctcctggggaggtcaacagttgaccctggccctttcctctctggtgcaacctccaaagggctattctatttctctcgcttgtcactgagctctacttcatgtgtaaaggcaggttggatagtttccaaatctttgttgggatgcccctctaaaccttggataaagtctttccctgtggccccattgttagcagttattacatgtccaatgtttgcctgtaatgctgctacaggtcttttttgacacattagttttgaaaattgtttttgacagcagctcttttggacactaaggacctggaaggcagagaccttatcttgtctcatttatatcccccaaatctagtacatggcctgaaactgtgtttattaaatgaagaatgtgttggaaaattagattctggagaaaggcttgcttagaatattttaatcagaaatgaactttgtactttttcgcctatactcctacggagccacattttttctaattatataccaagaggaataatggtacagtttgagtgtgagtgtttttattttcttttttatatattgataacaaactttttttataatgggcatatttggggtagaatattttctttttaatatattgataaactttttttataatgggcacatttgggatagaatatacttctatcccaaatgaacatgaaacaagcaaaacatttcttcaataactgaccaaagatgatagggattccacttcaccttagaatatgaatagctaaatagtgtgacttaattgtgtcatatattatgaataacagagttcatgagaaaatgagctatattttcatatatttgacggagcagaatatggcagtgaaagagcaaaatctctttcatctggatattcatcatcccaaaccaaatcttcattaaacttgggtgctagagctactaggaaagctcttgggagtcttctttgagactttgcggtgtggcttctgatgaactgttaatttggagacttgcataaatgtaaataaagtggcattaggacagtcctcaaaagccaaaagatggaagagtgcaaccaaacctggctcatttgcaattgcagtgatgccttgtggaaataaaattaatatctggggtacagtggctttaaagcaagatcctagatcactctaaatagctgtgaatcaggaaaaaaaaaaagtttccggttgctggatattctagatcttcatttctagattccaattatttaagagaccacagagcctttgtcaccaggacagagtcatttgctctgataaaggggaacaagatcttacaaagaacgttgttgatgtgaacaactagtttactgaagacaagtccttcaacacaaaaagaaacaagaaaaagagaagggacaagcaaattgttatcgttcagtcactccttttcaatccacttgttactatcctgatccaggttctcattatttctcacctggctaattggaatagcttcttaagtatatcctctaccacttagttcatgcctctccaatctgttaccacctctggagttgtcctgctaaaacacatgtgtaactagattactaacctatttcaggaccttccacagctcttcattacccaaaagtaaaactcaaggtttatttggccatctacaccactactccccgtaactttttatcctcattcctatcattacctccatgatctctgaacttcagcccatcagatgacctcactctaacacctccttcttttatatgttatttcttcataaacttggcaaaactctacgcaatcataaaggcccagtaaacatgatacctttaaaaaaaagatttttccaagaggtgcctctacttcattatatccttcaggccaattcatgactatatttccttttcttatacccagtagttcttacttagaatagaaccccaggaggaagatatgactccagccacactgttctgaattccatcctttttataaggatgaaatccagaacagaaaaattctgtggcagaatttttcttctgactgaaactgcaaggagattcaagcactaaaaaagatcattccatattcccaatcagtataatgacaacgatagttaatcccagtgtcaaggaaattttcttctcatttccatcttgaagctaaatcgttattctacttttcagataaaagcatattatatctaaagggctcgggttatgggattcctcaaagaagcagtcaatagcttgtaatccttgagcagctcttttcttgttcccatgagccccacaggctgaccccctctattttaagcccctcaaggaatctggattcccacatacccacttacaggtaaaatttttaaaaagaaaatgcatatgcattgtattttcccatttaagatattaacaaatagtcatatggccaatctgactatctttactaatgactgtatgcaatggctgaaacaatcctctcggtacacaagattttgtgatatttgaatacatactatactcacaccacaacatctatatccttaaatcactataccaatgcacaaacagtttacatatcaattcatgattatgtgttcacatctttctgtctagtaactgctggggttacaagagtgaaaaaaaaagcacaaccttttccacaaggaacttgtagatgagcccaacaagtgcaattaccagatagtgtgatgagggctttgataagcatgaaccagggatctaataacagagtaatgcagtagaatatcaaaaaagtattctaaattaaataatctacaacagaattgttcatctttaatttagtaaaaataggtttatgacactcatgctctatggccctgtaaatgtagcatcatttcacaccacatatgccccctactacagttacagttactcagatactacatggctcagcacgcttgttgaggatatcagaaatgataagatggtactttcattattttctattattcttttattctggcttttaaatgatcaatgtttaaaaggatatattttccattttttttaataaggtcacaatactctttctgtaaccggaccccagtccagctgctctccacttgaaagccaaacagagagccgagggtagatgggaaaagcaggtttaatatgagagccagcaaactgagaagatggcaaactagcattctaaagtaccattttacatttttaaattcaccatgagattttaaaaatgaaacataggatgggagacatgcaggaattctgcagggtgcagggtttgtgtgtcttgttctcgaggctgtattgggtaattgcgcctctgggggtctggaagttgttatcttgacttcggcctggtggtggtggacaaattgttcacaagtccccctaagcttgatgatgcctcaatggggactgcgtggtttgtttctaggtttgactctgggatttcttaagcaagagaataattagacaagcatgcattactggcaaggagtgtccagaggggaagaaatgaagggatgagaggggagggaagggaaggaagaaaaagaaagtgggtgaggtccccagttacatttctactttaatcttgatatttatgcctaccaaatgcaattgggagaaacagagcattattggaaataaatcacttttctatctctccacaggagggtagtatttcaaaaggcaacatacattttgggttggaggaaggggcgggtggagagtgaatgattccattggctgccacactgaggctcctggctttctatggaactcaaagtgggtggcagcaagcactcttctagcccagagaagtctgttccaggacgggctctttcaggagcagctaaagtcaggggccatgtccaccatgtgatagaaagacaagatggtcctgaaattctccgtgtccattctttggattcagttggcatgtgagttgaaaaggttcccaattaaattaacagaaaatccctgatggcaagttgttttatggcaaagtatgaaaggaggaattataaaagaaggaagaaagggggaaagcaagggagggaggagaaaggagtaaggagggaggaaaaatcatttcaggttgggaaacaatccctaattcccttccctggttccttctgctctgtttctaaacaggggtgagcacccagctgctggagcagagccctcagtttctaagcatccaagagggagaaaatctcactgtgtactgcaactcctcaagtgttttttccagcttacaatggtacagacaggagcctggggaaggtcctgtcctcctggtgacagtagttacgggtggagaagtgaagaagctgaagagactaacctttcagtttggtgatgcaagaaaggacagttctctccacatcactgcagcccagactggtgatacaggcctctacctctgtgcaggagcacagtgctcttgaggcacctgctgcctgcacccaaaccctgctgccagccccagtcacgaggctgccacatgcctccagctccgcctcgcacagcttatggcatgaatagagagaacaacctcagcccctcatggaaccatttctgctgcctttccagaaaacattttccacacacactggaggacaagacccctctgctataacacaaatatctggaaatgcagcctgctattaggatcattaacgatatgggcctgcaactccccggggtaggcagtagcaaagagagtcgatatagagggacaaatggaagctatcagacagactgtttctgagtgttccacccctgtgtagaaacaaagcagaaggcaccagggaagggagctagggattctttcccaacctgaaatgagtttttctccctccttccacctttctcaccccctcattctctctttcttccttctttcattaattcttcctttcatagttggcatcagggattttccatctctttaggattttctgttaatttaaatgggaacgccttcagctctcatgctaattgaatccaaaggatcaacatggagaatttcagaatacttcatggttcagattggtcattccgttttccagaagaccacacccaggaatgttcagtacaatggggcagaaatggatggtttcccagctttcttgtagtactccagagatgatgaagctgctatctttccagactcttacactgcagtaaaatgcagaagtattgtaaaaattagaagaaagttactacctttttggaagaaagataccgatagtacacctcagtagcatccaactgtggtttcaaagcaacatcctagttggtggttctgaaagtgaccaaacattaactacaatggcctgtatgttcacaggactggcttggggaagagtctttgaatggcaaatgtcaataacttcaagttttcaagcctgaagaagaaagaagttggcagtttcctccacatagcaagccctccactggcccattttcatacttgaagcagttgtatttgttctgtaaggcaagatgatatagcaaaatgcacatgagtttctgagttttgaaatcaaaataacttaaattaaaatctcgtttttgcaattttctagctctgtgtccctgggcaattatttatcctcacctacatttccttataaattaatgttagtaagaacacctatcttgctgagttgctatgaattaaatgagataaaatacataaaattgtctcaagttccaggcataacatgtatactcaacaaatgtccttaaaataatattgttattgatggccgtatgtaaatgtcacccctactgtggaattttcactgactacttaagggggaatgagttattctctgcctaatactctgagtcctcaccagaggagtcaggaaggcagacactgcaagctgccaacctaatcacaattcttttctgcctccttattaacaataccctcaattttgatttgggcaacaatatgtccagctttaaaaaagctcaacactacattttaccctctcttgcagcaagagattgccatatacatatagaacagttctgaccagtgagataggaccagaagttggatagggccttcccataatgtttttttctctcctgatacaagtacacatctctctatccctccttttctctttttaaaacatggaagagataactttaccgtaaaggaaaacacataactaatcccctttccttatcccatgcctggtagtcttttagatgccaagtcaaatccagcccccagatttaattttgcatgaaaatttttaataaaccattatttggttgagttttctgttgctgcagctaaacataattctaactatagtaagattgacataaaatggctttatgatttcttgtttccatgtgtaaaggcaggaaaagatatataaacaaattactttgtttatacaaacatggggactccatttatgttgatcatatctgtttcataaagtattaatattcctatattttttataaaggaaaaaaacttcacctttcatttagagaggactcgttattaaatttccatagcaatttcttatactcatggaagattatggaatccagatttcatcctaaagtcttttaaccacagacaatttccatgcaaataataactatagtcttacatttgtcttaactttatattccaaaggttatttttcttattttcttaaccttactctacccagtaatccattttaaaagcctcctctaaaaactttatcacattaaactccttcattctgaaaattttaaaggcaaatacaaataaaaataagaaaacaattttaattatctctgatgcaaaaagagaaagacactctcccctccctttcgttagagcacctactttagaaaacttgtaattgtgagttttctatccctttgaaatgtaggtaaatctttttaaaagctaaataaatcccttgccagttttacaatccaggactgtctttctcaagaacctgagagcatttttttcaaaatgtaatcacgaagggaggtagtgccctaatctagttttagtggagaataggtgcctaacttcagctggtactttgctcccagttgcaaaccaacctcctgtcataaagatatgagaaatgtttcctttgcatgaaggcaattacgaaacaggtggctacctcaattaccaggtaaattgaggatgaactatgtttgaaaaatgatgctgtcaagtcctctttcttgcggactagttattgtttatcttgagaaactgtaaacaatcagttgcatctgctcggctatataaaaggataagatttctttatttccttgtagtatctttagtggattgcctgtgagatgcatcacattctggtttaatgcttattcaataaaactgtttttttttttttttttttgagacagagtctcactctgtcacccagactggaatgcagtggcataatcagggctcattacaacctgtgcctcccaggctcaagcaatcctcctgtttcagcttcccaagtagctgggaccacaggtgcatgccatcatgctcagctaatttttttgtatttttatatagatggggcttcaccatgttgcccaggctggtctctaactcctgagctcaacctatctgtctgccttggccccccaaagtcctgggattacagacgtgagccactacacctggccaaaactgttttctttctcttctacctttgtgggaaggtgttatgggttgataggagattctgttttacttcctcaacaaaatggcccagggtctttccctaatcactgggcttacatgtctcttcctgaaaagcaccatgacactatgaaaagagcaagggtttctaaaggctctgtcccttattggctgtgtaaatttgggaatattatattaacttcatgagcatcaatttcctgataagtactgcagaagtaagaataaatacttaatttacagtattattgtgaagattagcaatgttttggtaactgcctagcataatggacttacaaattaaaaaattgaaagtgggaaccacggcttccacaaggtacactcaaaacctcatttgtgtcctgatatatgttttgagccaggaatatgtgtaagagttaaagaaagaggaaagaaacacaaaacacagcttggcagttaaagacaggtttactttagataaaacatgagaggggcttctggctgatttatttatttatttatttatttattttatttttatttttattttttggtcaggagcactttctcttgcagactaagagtatatattggttttagggtgagggggtttatcacaatcttggaatgtttatgtgtggaggagaagtttatggcggggtttggaatctctctgggaggaggggaggttatcttgaggctgatgtctttttggcaggagggggattatcttggggctggcaccttcccagtcagagcagggttatctcagagctagcatgcctctggttggggaggagtttggaatgtttctggttggagatgttatttgtggtttatggtcatgctgaccatagccattaggctgatggcctttggacttaggaagtttttgattaaggtgaatgttaaaatgagggcttgtccaagacagcgatgctcctgctttgtcaatatggaaaggacacagtccctgcttccaaggaactcactctcatggtgatagacagtcatagacttgctcccatagccatcattctccaggggctataagttgaagaatcctctgacctacaacctccattcagagcagtaatttctgagagaaattgcacactctccacactcctgaatcactgtatgccttcctaaaaacacactgctgatgtttaagaccagactcaggcaccacccctgggtggggcatctgcattgctgcagaggaagtggtgttagctctagggggtactctaacctgagaaaagtctccttaggctgtcaggaggattgatggatgaatggagaataaaaatctctgaaacaggaagaaggctaataatttaggctgagggtgggggatcagtagcaaaagagtatatggaccataaaattcttaataacatacataatcctgctttcttatcaccaattctcctttatctccaagagccaagatgaagcttaagatttaaagaagacaatttgtttaacatttatttatagttcatgaattaatattttttagtatcaggggccaatatgagactagatctgtttgtccagaaattatttctaatctctgatcactgttcttatctaaaccatgcctatggacatagagggtagaaggatgattaccataaactgggaagggtagtgggaggctggggaacaggtgggactgtttaacaggtacaaaaaataggacgaataagacctactatttgatagcacaacagggtgactatagtcaataataatcgtacattttaaaataaagaatataagtggattgtttgtaactcaaaggataaatgcttgaggggatgaacaccccattctccatatgtgcttatttcacatagctttcctgtaacaaaacatctcatgtactccataaatatatgcacatacttaagtactcacaaaaattaaaaattgaagaaactcaaagccaagaaaaatttttaaaaagaagcaaattgagaaaatgtaaggtgtagctgggaagaaaaggatagagaaaggttaagaagaaaattatggaggactgtctgaattgaaaagcattgtctctgtgagtttgtcaacagcaacattactagcattttgggccgggtaattcttttgggggaaggggcttttctgggcactgtagggtgtttaacagcatccctcatctctgcctactagatgccagtaagattctcacctgtggcaaacacaaatgtctccagacactgtcaaatgtccctggaggcaaatagcccctggttgaaaaccaatggtctatatgtctacatattgaatgttgaattgatagagcaggaaaaacttttagaaggtatatatatgtgtatatatatatttagtatatatatgtatatatatttattatatatgtatatatttattatatatgtgtatatatatttattatatatgtgtatatatatttattatatatgtgtatatatatttattatatatgtgtatatatatttttattacttatatattcatatacacaaaatgaggatgttaacatttttctactattataacacatttttattcctatggtggtcatacgtcctaagttgctattatttcatttggctttaataaattaaataagataatttcaatgtaaaaacgggaattgtaatatatatatataaacatatgtattttatatataaatatatataactttttatacaattcattcacaatgcaaaaaatttttcagtctgatcacgttccagatttcaccttggtcaatatcttttatctctgactcctcaaagacatatagactgtttctctattctttctctaagctactgtgttcctgttcttccccaaaatgattcttaaaccctaaaaagatgacccctccattaccccccacccacacacaaacacacacaaggactcacgcatacgcaccacagtgtgcagaaggtgaactaaaccacaggtaggtggagttttccactaggaagctgaggggcaactcccgggagctgctgccgctgaatctgtctcatgaaatttctcagccatgggaacaaaattagttccaaattcaagatatgatacttaccaatatttaaagagaatagatatcaaggtgtgcccctgtagcaaaaaaagtaaagaatcatgaaggcattaataggaatcttgctgggcttcctgtggatacagatttgctgtgagttaaggacagcccagaggaaacctggaggagtatcacaactgaatttggaaaggagcaatggaggaacgggagagatggagaaagagaaagaacgcaactctcaattaagctgtgtcctctatcataaggaagaaaactacagagaaattttctacacttggaaacagctacagtgattttgtgatgactctcatctgcatctacttttctctttctgaacgggggtaaaagcgcaaatgaaagtggagcagagtcctcacgtcctgatcctccaagagggaagaaattcattcctggtgtgcagttgttctatttacatgatccgtgtgcagtggtttcatcaaaagcctggaggacccctcatgtccttatttaacattaattcaggaatacagcaaaaaagaagactaaaatccgcagtcaaagctgaggaactttatggccacctatacatcagattcccagcctgaggactcagctatttacttctgtgctgtggggacactgtgctcttcagacacctgcagcctatacatgaaaccatagctgaaggcctaacccatccccgagagtggcagtaggtcccgatgtgattagcattgcattcccactgcctacatctccttgcatgtcctgattcatgtggaaagtatttctaaatgagttgtaacttgacactatggtgcaggtgcataaatggttcccctgcagatatctgtgggaatggtattactaggcaaaatctattgattgatcaactctttcatatattatcatatctctctggataagaatgagcagagtcctcaatcctccatatccaagagcaagaaagcaccagtctcacctgtacttccttttccacatcttttttatggcttactttagtacagacagaatcctaggaaattttccatgatattttttctaacagacttaagtgaagatgaaaaggaagagggaaaatagatggcctctactaccatgaaggatggtcagagctttctgcatacttgaccagagactcagccacttacctctatgctgtggagacacagtgcttcccaggcacctgaagcctgaaatcagacaagtacctgcaattctaagactcaacaataagttagagatgtccatgtgttttgctgtaacatggttttgagaagcatacacttgataaatcaaagtgatttcatttccaaaaaagattctgatgaatacttactctagtaactatctctgtgctaaacagaacaattcctaacatcctaatccctaaatcagggaatcaatgagtcagaaattctagataaaggatccctcaaactcaatgataaggctttctgtcaaaaagggtatttgcaccccgaatgctacttattcttatcttacattatctatgtataaaggaaaatcttgagaaagtcaaaccaaaatgtgtcaaaaaagacatgctaagctctctaatccttcattatttttttttccaacttcttttttttttttgagtcggagtttcactcttgtcacccaggctggagtgcaatggctcaatctcggctcaccacaacctccacctcccaggttcaagcgattgtcctgcctcagtctcccgagtagctgagattacaggtatgcgccatcatgcccagctaatttcttgtatttttagtagagacagggtttctccatgttggtcaggcttgtctcgaactcccaacctcaggtgatctgcccacctcggcctcccaaagtgctggcattacaggcgtgagccaccacacccggtctccaacttcttaaagtatttttaattgttcattttgctcatattcaatagtatctatatcattttcctctttgttatgttttgtgaaggttattagaaaaaagcttatttccagtcatgagtatgctatgtcatcttcagcaagtgagtcattttatttgtccctcatctcagaatcctcatttataatgtgaagatgatatttcccacccaccactactcacaagtttgatacattaattattcaacaaataattatcaaatacctattaggttctgtagggaactttgaataaataaagagttctttccttgttgaatatatttctagtggggaacacatttttattatcagttcctataaaatagagaaggacttaactggcacagtaaagggtattataaaaacaaacagatgtctgttaaaggaagctttctggagtatgtggtgcctcagttcaaaatctggcaatttaataggagttaatcagactgaagaacaaaagcaagtgggggaaggttctccaatttgaggaacagcatacatatataggcaggaagcaaggcagattatagcaattttaagacataatgtataatttgcaagttattaaataatgttcataagtaactcttattttatgggagactaaataagaaccttgaaatgaatcgtctgtaaatcataatatggtaaggtgaaggatatggggaacaaaattactaagcatatctacatcctaacagagcagataaagataactgcactaagaacaaataaaaataatcatgcaactgattgatgataagaaaatgttagttcttcagagaccctaatcccttttaagtgtggaaagtatttctaaataagttgtataagatatgataaatatgatacataaatgtgatccattttgactattaaataaagctgaaatttccaatttgataaaagtctccactgattcaaggtactcagcaaactctaaacagggtaaatgtaaagcacatgcacacacacacacataaacacacacagaacaagagaaatgcatacttctacacatcagagtaaaactgctgaaaatcaaggaaaaagagaaaaatccttaaaatcagctttgcttttgtttttcaaagggtcaatttcatttccctcaagtttttctgaaatcatggatgagtgagtctagcaaatgcccagccctcttcaggagccgggaaacatatgtggcccagttgcaaatttggggacagcttatggaggcctgaagatcactgcatttgatccacataggtagacacctgagcagctgggctggccaaaactaatttgacattatagtataggcaagagaatggcatggactcctcattccagtcaaccaaaagcaaagaagaggtgttattctactggctgagatgattgatgctgcctttcatggagaaatggtttgctacaatacagtgggggtaaagaagagtatgtctgtggaaactcttaatcccaccatgaatgatgataaaatttaatggaaaactacagcaactcaatataggcaggactgctaagacatagatcttgaggttatcatcccaccagacaaagaaatatgattgctgagggcaaaaaacaataatgaatgatggcagaagaatgaaattgtgcatactagctacaacctcttgaccagtgacagaaacaagatctgaagtagttatgggtacatcttccttactttgatgtgtgtgtgtggggcggggagggttaacaacccattctttttatttcttttattcttctactgtctgcaatagtatgtgtttttatttgttagctttatggctcactataaaattcacaggttatcaaaggagaagtatgactcaactagaaaaagaataaacttcatttaaagatgtataaagtgacacaagggaccttgcattttcttttggggaaaaggttagcatccttacaattttatggaagaaattgcatcctattaggtagaataattattttactattgtcttatatggaaattaaataccatcaaatgaggtatgacctaacgcaaagtttataaggaggtacaaaatggtggtttgtactggattaagcagggaaccaagtttcccagagtttccttttttgtatagtagcaggataaaattggccaaagagtaatgtgtgtgagctatggaaggcaaaagtgaaacagtagccactgctctctgaagcagtcatttgtcatatctgacaaatagacacggatatgcccagcaggtgccagcatgttctaactctgttccactccatgcctagcatgccttcctgctgaccagtcaccttcagatgcctggcgatagatgaatggagatggtaaccacacaaaggcaagagcttccttagacttctccttgaacttccccttcaaatcacacttcagcagctgcaaatgcttggtttctcagattaactggttagagtttccttctctggccctcccacagcccttagaccttcactttcctgtctcctttcacaatcacgtaaagccaaattcccataattaagcccctatcccatacaactcatggtgactttcctgcacttgacgataccctgattgatgcactagacaaatataaattagttcaatggaaagttgtccgtcttttaaaaatgtgtatccagatacctattgggagaaagaacaatcagaaatctagtcttaccagaaaaagagtagaccttaaaagaacacatgtagcaaggtgagttgcaagggaaagaagagagggaagaaagggatacagcctgtgggctcctgcatttccatgaaacactgggtgtaaagaatcaaatttactgaacttaaagtataataataaaaaaaatctatctatatatatatacaaagaatcagatttatcactatgtgaagatgtaggaattatttttaattaaaaaattctcatcagaaagaaattacttataactttatgaataatttaacatatgtcaatctaattctgtgttgttaaagtaaagatatcaaaggaatagctctactcccatgtttcagaaattcctggtagtataactgagtagtctttattagggaagacagacttctctaaacatatctggtgactcagtttggtgtatgcaaatatgaatatggatatgctatgacaagtgtccccaccccctcccccaactaatttcctgtgcagagacagctgtgtcacccatctccactgattctgcaagggacttgtcataaaaactgaataaggccaaggttcaggctctttagagtggttacttccctaggaatagaagtgtcaacgtgacttttataacatgctttgagcacgttataaaatttgtaaattgataggctcatcttctgctctcccacaagctcaaaacactgtgaattttttacatctccagaatagaacctcttgctcttgtgtggcggagccatcatcagttcttttaatgttcaccactctcggtagataaaagttctatttcattctaattgttctatgatatgatttagaatcactttaatgacacagtcttcagtgtgagaacttctcttggttccagcatgcataccccaggaggagcagaatctcctcaggtctaggggacctagtgggctgtaatactctctctttctctctctttctctctctctcactctctctctctctctctctcacacacacacacacacacacacaagcaacaaggtgaattcaccacaaatataaaattgtgagccaccaataacccacaatcagcctcaaagcttgctgaaaaatctcgcactaacacccctcccaaataaaacagttttctgtagcaaggcatagagtcactcatatccaatgattcaacatggggcttgtgatgcatctgtgcattgtgtattttgtacttttgttgtctaaatggtgagtctgtgtgcatgtgtatgagagcacgagcgagagagagactattacagaccactaggccccatggacttgcaaaatcagccttcttatacatgattcatgcatggatcctcatgttttgcgtgtgaccacccttcctaacatcaagtcataaatttcctacagacagatactgaaattcaactataatgaacggagttcatttgctgagcactcttggctataatttgtctgtgtacttttaaaattgcagatacctttgtccggaatgcccttttcctacaaagccaacttgttaatcttcctttatctcttaaggccccagctgaagggctctacctttgtagggtcttccctgactccacactgctaacctcctcagcagaactaatggatcaccgttatgctttcctcataaaaacactcatgtctcgtgctatgttgtaagtatatagttacacatttttctttctcttcaaattaccaggtatttatgaatgaagattgtcccataaccatatttgagactctaagccaggcacattgctaaatattgcataaaaactaaattaatattgattgatatataaatacacaaataaatcaatgaaaatttcttcactagaaagtctgaattatataggtttaaagtatataatatgcaacacagacaatttatcagtttctcctgaatcaattatttttaatagactatatatatacatacatatgtatatatatactatatgtgtatagtacatactatacatatgtatatatatactatatgtatatactatatattatatatgctatatgtatatactatatatattatatatatactatatgtatatactatatatattatatatatactatatgtatatactatatatattatatatatactatatgtatatactatatatattatatatatatactatatgtatatactatatatattatatatatatatactatatgtatatatattacatagacatatatattttttttgagatggagtttcgctcttgttgcccaggctggagtccaatggcgtgatctcggcttactgcaacctccatctcctgggttcaagcgattctcctgcctcagcttcccaagcagctgggattacaggcaggtgccatcacgcccggctaatttcatatttttagtagagacagcgtttcgccacgttggccaggctggtctcaaactcctgacctaaggtgatccagccgccttggcctcccaaactgctgggattacaggtgtgagccatgatgcccagccagacttaatgtattaatggacttaaaacacttttaatagaggcattttaacttttctgagtatttgtttcattattcttcaagtgaaaattcaaaatgtttattaccataataaaatatgcatcaaatattattttattatgtgttatcagtccttgctaaaaataatttcaaaaaacattttggaatttaatctcagctgaaatcactagttgccctactaattcagcattaaaagtacaattgattcttcttccttcctccatcatagtaaaccatggggaaatacattacctgtggaccaagagtgaagataagcagctatgttgcctttttggcatcttctggtaaatttcatgaatatattgtctatagactttacaggattatgtcaccgtttttctcttttgaaaatacagaacacactaaatgatctcattcaagttccaatagagataatttcagttcagaaggtgatctaatacagaagataaattttgttgtgctgatttgtgtttttgagagaggtacccagaatttaaatttaatttaattatgttgtgctatttatcatatagaaaatatgggcatatttgaagaccatattagaattcaattgcactaaagagtaagctacgaaacttctttgtgttctaaattcatatcattgtattaaataaaacatcatacccatatgcgtccccaataagtatcaatccttattaatgtttttaaacaagatgtctgccttagtatgccagttgacaaggtgtcagtcatttgaccttatgtaattctctaattttcagctatcattttctactattgctgtgtgtgtgtgtgttctctaaaaacttttccttctctttcaatctcttgttttttaactttttatggagaaggcattataaaatcatctttaggaaatacagaaacacatttacagaaactttctacatttgaactaaagggggcagtgcttcctttcataaagataaataagcttagagctccacacaggttgttcatatgtaaaatgaagggtctgtggaaggacatgaataaagcacaggaggttgaagtcagatttgcagctttctaggcaggagataagacaatctgcatcttcacaggagggatggccatgctcctgggggcatcagtgctgattctgtggcttcagccagactgtgagttgtgcatgggaggtttgaatatagtaagaaaagctacaaggaacactacaaggctgggagataattggagaagttttgttttgttttccggatcttgatggtttcctgtggggacattaaaaataaaactgaaaatctgttattctctttccaaacaggggtaaacagtcaacagaagaatgatgaccagcaagttaagcaaaattcaccatccctgagcgtccaggaaggaagaatttctattctgaactgtgactatactaacagcatgtttgattatttcctatggtacaaaaaataccctgctgaaggtcctacattcctgatatctataagttccattaaggataaaaatgaagatggaagattcactgttttcttaaacaaaagtgccaagcacctctctctgcacattgtgccctcccagcctggagactctgcagtgtacttctgtgcagcaagcgcacagtgctctccaggcacctgcagcccgtactcaaacctgctttggggactcagactgggagacacatagactcgcttccatttacacatgccaatatgagagattatgctttgaagtaggtgaggcaagttgagcctaaagaaagactgatacatgacaaaaccttacaaataagttaagaaagttccctgagttttagagtgtttaagagtctaaccactctccttttctactttcagaaagaggttgctgatttagctaaagcataaatctctagtgatgctttgtttctgctagcttctggaatgcgggtgccctgtctcccttgtatactagggggcaaggatgtgtgtttggaatgggaaaaccaaggtcctactgcaggttcttccagtgatgaacatttcctgagatgtcttttcttttagtttttctcagtgtacaggcatttctgagcaaagaattgcatgtgtgaatactaacttatgtatatctgcatatctataaatatttctatatgtagcataaccatctgtatctatattaagttaaacattcgttcttagcaatgtctccaatgctaaatcattaccacgtggatcacactagcctcctccccttacttatccataaattcccactacaggggtgcacagcctggctctcactgttaacaaaaagttattcagtaatacttgttaaaacacggtgaggcagaatttatttaggaccatcatgataggtacagagaccactgcaacaggattttgcagtgagggagaagaattggattcaactccgaatacagcatagacaagtggagatttctagccaaggggcagattaggggtcagtggataggaaattactaagaggaaacattagaaccaagggatagtctggctagaccagccaaacaggatccttgcagaagacaggtcagggtgatcagacatcaatcccctgggggatgatagaggatgaggagcccagttggatatggagtgtaatcagatatcaagcggaggatgacgagggcagcaggggagggtgtggttcttgctaaactgacttagaaggattcttgttaaaactacattttacaagaaaatgtacagatgagcttaggagaaacttcaaaagcctgactaaagtttggtcaagcaaagaatttttgtcattaccacccactattcatttacatcatagtccaattccattaaacatgtatagtggtatcagaattgttacttgtagctccatgagaaagaattttatcacttagagcacactgttgtgtaatggtaataatgtctagattatgttgaacttctattattccacctgttttgcatgtattacattaattcttctaataattatttaagacaactattagaataatccatattttagtagagaaaacaggctgtgggagttcagggatttgttcagtatcactaactttgtgagaaaagagagttcatggtcactcatgccccaaaccaccaagtatgggcccttcctacagaagctattaacaagtcatgcttttgaacagctagcaatctttaaaattcttatcatacatgtcttcatcattgacctatagaagagtgagattatcactcatagagaattaaaagctgaaattatggttttatatgtatattgtatttgtagataaatgattagagcttgttcctcacaggctgattttctgaagctgaagatctttacagagagaagatacagaaattcaggatacttcccaagaagcatgcggaagcctctgtaaatcccattacttatggcataatctgaacagtgacttcaggaacagtgatttcaggaatgctgaagacattttttatcagaataggggtgatatataggttggcttagctttgttcatctagggatccttgtggggttggtttaactataaggtaaaatctgtaggttgatcaattctctcatatttaattctatattcctgaacatggatgtaaagctaactcagtgtgaattagatttattatccctccatatccaggagcaccaatatcacatgcagtattttttctgttctttttatggcttacattggtataggcaggaaaaattccaagatccttttcgtaatgcacgtaaatgagaatgaaaagcaggaaggaatattaagcatcactcttcatacttagggtattccatgcacatctcgggctcctactctagagcctcagctactctgagcagagagtctgctgtgcatactctttgctcacaggcatccagagcctgttcccaaattcaaagctgtagccacagatcccagcaaaagggcagacacgcgagagttgttgctgtcttctagcagggtgtagagaaatgtagctacgatgaatcatttcatttcagtttcaaaaaatgtggaaattcagctgaataatcagtccagttactatatatccctgctcttaacaaaactatttcaaataccttaagacaataaatcagcttttcttcttttcagatatatttaacatgatttataaattactgaaacccattataaagttctgttacaatggacatttttcactctaactgctgttacatttaccccatttcatgtcttgcataatggggagggaatatattaatgctgtctttatccttctaaagcaacgtagaatcataccagaaaaaggaatactacattcaatctcatccctgtctttttgttcaagctcttcagactgcttcaactttcacatttcattcattcccacagttatctatttacgttcttttcttatctaatatatttgggaaacagcattgggaaaacatactttctagcattgttctagccataagtgtgttgtgtcttcttgagcaagtgaatcaacttcttaacattttatatcaggaccttcatctgtaatgcaagggcaatgatttccagctaacatcggtctcaagttttattcattttatcaattagcaattgttaactggttgcctgctgagttctgcataaatgttacatgctgggaaaaaaagagctatggaaaaatacatatcttctttgactaaattgtagtctagttagttatgtaggcagctaatcagacagagtaaagtgaaatgaggccaaccttgggaaagcaaagggaggtatgaaggcatatggaaagtcccacccccatcttagccttagaggtgagtcaggggcagcctgtagtatgtcttgcctatgctgagacctaaagatttagtaggagtcaatcaagttgaaagacagagaaggtagtaaaagtgatcttaaagatagaaacagcatgtacaaggtgacacagaacacaatgaacctgaggactaaaagccagaattatgctataattaaaattatgtatgtcataaaatgttcaaaccaccactgcaaagcagttgtaccttaattctcagttttataaatgagtaaccataatatttgtgaggttaccaaatatgttttctatttacttgagatttcacttaataaggttattcatttgatacctaatatgtgtcttagacttgaaaacaatagatgcaaatgagaagaataaggcattgtttctgccttcagggagcatgtaatattgcagagtgtattacaatatagtataataaaagctatcataggagaagcgtagaatataaccacctaacagtggcatttaatttggaaacttaaatgtaagggaaagctgcctacgggaagtagtatctaggttaagatctgtaaaacagttagccaaaaatggagtcagagacagggtattacagaaaaagataaatagaatgtacaaagacatgaagtcaatatttaggttaagagaatgacattaaactaattcaggatggccagagcatacaactcaaaatgtatgtcagtaaatataaaactaaagcaataagcagaaaccactttgtgaaaataattaaaagccattataagatgtttgtacattacattatcttgaagacaatgatgagcagtgaaagaaatctgcacaagtaaataatataatgaaatgtcactgtttgaaagattactatgagttcacatacttatatattatatccatgtgtgggcatgtatataaaatatatatatgtagtaaaatacatataatacattttcccttgatacttcttttttctcttaattctggagtaattctttctgtaacacagtatattgataggcccttcttatagcaagaaaaaaacctatcctgtatgaaaacttactcaagaaaagccaaaatccacagtttaatcaacattcctcagtctggccacaggggagagctgtttaaaaagtattctaggtagatgcatttagttctctgcagttaaactgttgtgatgtgtctctgattggttgcccccaaagttgcaatatcctggaagcaattgcaacaggcctcattctgagttcaaagcaactcctgttaaggaagcccattcagaagctgactggatattctggcaggccaaggatggagactctcctgaaagtgctttcaggcaccttgttgtggcagttgacctgtgagtacacgattcagtctgggagaggttgtgatatgacagcatcttaatgacaatagctttctgtcttgggaagggcccttttaagaaccagacctaagaagtgaggaaaatgtaccgtaattatgtggtgatgcttaatgttttaaataaggaaggaagagagaaaatcacccttcccttcacgagattgagcatctcattcgattgtctttctgatcaggggtgagaagccaacaaccagtgcagagtcctcaagccgtgatcctccgagaaggggaagatgctgtcatcaactgcagttcctccaaggctttatattctgtacactggtacaggcagaagcatggtgaagcacccgtcttcctgatgatattactgaagggtggagaacagaagggtcatgacaaaatatctgcttcatttaatgaaaaaaagcagcaaagctccctgtaccttacggcctcccagctcagttactcaggaacctacttctgcggcacagagacacagtgatacccaggcctccaagacctgtactcaaacctaaagctgagccgcagatgctcccctagcatagatgcccaccacaggagtatggggaacttaccagaaggttcatccatgataaaagagaaacctgaaggaaattcatttgcttcaacatataacacaaaaagcaagccatggccttaagaccatatctaatttggcattgttttcttgataattatttaattgctttgttggtattatatgatagataacttagattcagagaaaattacatagatttcagtttcaaaaactggagtgaattcctatttgactgaagctatacatataaactccttttggatctctgcattcctatctgaaagtgaaaagtaacctctctttcttctcctaggtacccacagcttgacaataggacagcaaaaaaaaaaaaaaaaaaaattgtctggttctttcttggacgtgaggattgtacacggtaggtatttagattgttaatcttgttacctatctggaaaggtcactagcattattttttccaaggttttaaatatctgttttggggaaatggcatttagaagtacttcaattttatatttgccttgccttctcttctcattgaggtttattctgattgatttccagctttgcccaagggaccctgagttatcttaccagtttgcccaatggtcaagatccttcctcaattgttcctttcacatcaacccagcacaacactgcatgtaggaaacactcaacaagttttaattgagtcatatgttgataagaattgagaatggccaggtgtggtggctcacgtctataatcccagcactttggaaggctgaggcgggtggatcacttgaggccaggagttcaagaccagcttggccaacatggcgaaagcctaactctactaaaaatataaaaattagccaggtgtggtgacacacacctgtaatcccagctacttgagagattgaggcatgagactcacttgaacctgggtggtggagtttgcagtgagccgagatcacgccactgcactccagcctgggtgacagagtgagaccctgtctcaaaaaaaaaaaaaaaagaaaaaaagaaaaagaaaaagaaagaaaaaacaaacaaaataatcacacacagaattccttccacaagatcagtcttccacaaacattctacaacttgcttaaatctttagtcttgtcctatcagtctaccctagaacaaaaatttaatttttcaactttctatattcattgagttttatccatcattttttttactcagaaaactttaaaattaactttttaaaaacttaattttaaaaaattaatttaaaaagatctccatgctgggaaaaattactttctctttaacagaaaccagattcccatgccttcttagaagctttttatcaaaaacacaaaacaactttatacactttgcatatataactgtttctcttatagctagtagtttgttgttttgttttgtcttgttttgtttttgagatggagtttcgttcttgtcgcccaggctggaatgcagtgatgcaatctcagctcactgcaacccccgcctcctgggttcaagcaattctcgtgcctcagcctcccaagcagctgggattacaggcacacactaccaaacttggctaattttttgtatttttagtagagatggggtttcaccatgttggccaggctggtcttgaactcctgacctaaggtgatcgggccgcctcagcctcccaaagtaatgggattacaggtgtgagccactgcgcccggccatagctagtataattatatacataaactgtaatgttacttcttagtaactcttattcttagtgaaaaactgaggaagtaagtaattctaattaagcaccagatacagagtccaagacaaaggacaatccctggagctaggcttcacaatctcctaaaggcccaaatccaaaaacatagtttatagacaagttaagtgtcaaaaattgtcataaaaacacattttatgatcttaaaacatctagcagagataatatctgaacaacaggccaatagacagacaaaatgtctaaattaaatttggaagaggtttctattttattttatttcaccaataatttttaaattgtctttatttgttaaagattactaaagtcacatgaacttaaaggtgtttgagttaaggtttctatttttctcataaaatatttaagtgtttactttttaagtcaattaattagaactctttcacatattttggttgtgaaacatcacatacacataacacatataaatatatagacactagacacacagacacacagacagaagcagatcttgtagaactatatgattttttatttaccaaatttaagtagttgtttttattcacagtttcaattacctattttattgctctaggcaactgttaggcgaccctaaatttgcatttctgaagtgataactctcaggtgaaacaagataaaggatttgcatctcaaaatacagacagagacagggaatttaagctctttaaatttggttgtgttagaggaagattgaaaacatggatgccaagtaacacaaaattatataaatttatcacgggcttttataaggtgaccaatttcatttagataggtgcttttaatttagtctcttttttatctggaccattgaattcaaagcataactcacactaaatcttgggtcccccaaaagaggtaaacaccatggggattaggacacgccatgttttcactgtacatttcactgcaaatacatttcccctgaggctggtgggcaacccattgccaatcagcccactctgcgatcagcccattccttagccattgtacacaccaaaggcaagcttttcacaataaaaagaaatttctagtaactccagaagcaaaaatttctggtagtgcaatgcaaaggagagaagagttttagatctgagaagacactgtccattttcaactcttgggattccctgaggaaaaaaatagcagtttctcccataaatgggtctgtggcacattttctgttttttcttaaggaatcccaggctgttagaatttgttgttgttgttgtttgtttgtttgtttttgtcttcttatgtggcactgagggtggcaagaggaaggaaagggcgatagaaagagagagacagagggagtgcacattcctagcagcggtttaagaagaaattcagttgcctgagaaatgtttacagagagagagagaacagaggccttaaagcagtaagtaaatacatacatagcctaaatatcagttttaattaagtcaacttttgactatggagccctttaaataaatcctgtcaaatctcttattatcagattttagctgagacaaacagttgatatttctgacttttgaacttctttaccaaaagatatacccccaggtgccttaatcaaggttattatataaccgtgggtacacaagctgtctccaaagagttggcaagcattttttaacaagatccagaatcaccccaaagatcgctcagcgaaggaaagtttcattaccaataaatggggtataacccatatttctgtcaggccatgtgtttagagtcttaccttctcagctgaccatatgcacacaaaggccccaaagcctcatgtgcccccaacagatgaaaaaagacaggaaacaaaaagctatggaagtgggaaagatcaatcataaagatcaataataaattgatacccaacaaaaaagtcacacaaatattaaaccgagaggggctggatccctgaccagtaatcagactcaccctgtggatgtgaaagtgcagaattttaactattgggccacaggtggagtggcctttgtttttccttgaccagaaagcaaacccaagcctctgcaggaattttacctaccagaactggtttaggtcagatttttcactcttaatttagtcaagagaatttttaaggctggccatgacactattatatgtcctttttaaatgtgatctctttgttaattgtttagaataagagatccctaaaatctttaaattaattgcaccgaaagaaaggatgggaaaagggtcttgttgtgtaaatgaaacttctcaggtagtcaaattgttgacctttcttacccagccagggtttttagaagtgaaaattgactttctccagctgcagagtttcattcaacattagagggggccaggagttggtaaagtctaacagaaggtggaccaaaactgaaaagaaaaaccagaaaaagtgatcacagaattcacatataattgcgatctctcagcataagggtaagttatagccaactgacaataaaccttgcccttcagctaccaaatcccaatatgaaaccagctccttacctggagatggacccaagctgaagactgctgtctgccatcatggaagcagaaactaccagaaaaggagttttacagcagaataaacctcagatcccaattgaaaatttgggggagatcagggatctctggagggagaagttcccagaacttacatagcaaatcatccaatctgtaagagtaataaagagctccagccggtaccagggccccaataggagacctgctggaggccaagagccagactccactcagagtcccttcgtggtcaccaacatgtaagccaaaaagtgactgaggcagatctctattgattagaggtttattttgccagtcgaggatatgcctgggaaatagaaacataagtcacagtaggatccttgacctgtgtttttccaaagagggttttggaaacttaactatttaaggtgtaagagcaagcaggagggaaaggggaaaaaaggagggacagtaggcaatgagacaagtggttacattcttataaggctttgattaacactcaatgaatccacattttgtgtgtgaaaaaaagagagtagaggaaaaaatcaattaagcattcatctcatcctcagtaaatctacattttacatacgatagagtaagcatgtgaaattagagttacctgtttgggaacagaaggaaggcagtgttttgtgtgactccgtttccaaccttaattttccccttggcataataactttgtggttttcagattttatttttctttccagattgagattcccatgaccccccatttgagttcaattaataattaatttgctagaacatctcatagaactcagagaaacacttacttacatttactagtttattataaaggcatacatatattacaaagcataaggatgaagagatgcaaagggcaaggtatgggggaaaggggtgcagagcgtcctcactgtcttggggcacaccgctctcaaggaacctccatgtgttcagctatctggaagctctctgaacctagtccttttaggtttttatggaagattcattaaacaggcataattgattaaatcattggccattggtagtcaaccttcagactctctccccttcccagatattggggatggagctgaaagtcccaactctctaatcatgcctttgtctctcccatcccccatcctgaagttacccaggggctgccagccatccgttcagtcaatcattaacaaagataagacatcgcttcagagtttctaagtattttaggagtcgtatgtcaggaaaaggggtcaaagattgaatatatacttcataatatcacaagtcataaaactgaatagtacttagcaaccaaaagaaataaagtactgattctttcaccaatatggataaattttaaagcattattctgaaagaaataagctagacacaaaagaatacctaccatataattgtatacatacgaaattttagaaaaaagcaaatctgatcgatggtgacaaaaatcagatcagtagtttccaggtattgggaatggaagaaggacattgacaacagtaagtcacataggaacttaaaaggtgataaaatattctatatgttgattaggatagtggttacacagatgtaaatgagggaagagagagaccctctcgtactgttttatattgttttatactcagtacctgttttaagaaaaaacaacaaggaagtaaaaccaaagacaggcagcctgacgccaggcccgaaaccaggtctgggcctgcctggcctaaacccagtagttaaaaatcaactcataacttagaaactgatgttattcatagattccagacattgtatagaagaacactgtgaaactccctgccctgttctgtttctctctgaccactggtgcatgcagcccctgtcacatacctcctgcttgctcaaatcaatcacaaccctttcatgtgaaatctttagtgttgtgagcccttaaaagggacagaaattgtgcacttggggagcttggattttaaggcagtagtgtgccgatgctcccagctgaataaagcccttccttctacaacttggtgtctgagaggttttgtctgtggctcatcctgctacatatacatttttcaaaaacagcttgactgttatgcttaaaatgtgatatattatttcatgtaatttatattcaataaaattaatctaaaaaagattaataaaaggatttagattctagatctcatgataatctgtaacacttcttttaactcaatagaagtaattcctctgttttaattttgggcaaaaaataaaagaaagagataagataacaagaagtaggaaaaggaaggtaacaagaggtagtatgcaggaattaaaattcattctcttaaattagaggacgattacatcccaggttcttcatttactgtatacgtgatcttgagcatgtgtctgagcctctgtctcctctctgtaataatttctcacaagattcaactgtctcacaaggggaggattaagtaataatatgtacataatgttcctagagcatgataaatgttcagtgaattttatctagtatttttattattaaccaaaggtggtcattttaagtgagcctaggttctctaaatcaaattatgggtggtaatcaacatggtatggcagctccagaatatttttttaatctgggcaacttgaggggctaggggtaaaagtagagaaaaaagataattgtattattatctcagaaactgtccagtagcctggaatcccaagtgctatagtttgaatgtttgtccccttcaaatctcatgttgaaatgtgatccccagtgtcagaattagggttgaatgggaggtgcttgggtcatggaggcagatccctctgaatagattaatgctctggagtggagagaatgaataagttctcactctgttagttcccaagagaactggttgttgaaaagagcctcgtatgtccccctctctattgcttcctctctcactttgtgatctctgcaaacaacagctcccctttgccttccaccatgagtggaaggagccggaggccctcaccagaagcagatgctggtgccattcttcttgtatactctacaaaatcatgagccaaataaatttattttctttataaattacccagtctcagtattcctttatagtaacataaaatggactacgatgatgggaaataatattttatcaatggaagtgatcttctattataactgagccaagagaaataaaattgaatagaatggaagttttcttttgtcttaacaaagttaccaaaatcacacattgggaggataagcagaagtctaagataatcagaaaacagagtagactgcaaaagaattgtttgaaatcatcaattaagatggaaaggaggcagggaaaacatcatagtttctagtatcaccctgaaattttgtgtgtaacaatatatgtatgtctatctacatccaaggatacaaaaccacatctgtattttaaagtaaaatatattttcttcactcaaaaaaatatataggtatctttttaatctcagtctaaatctgggaataaaattttgtggccccaaaatgtctggagaataactaagcaaactttgctagggaaagagctgtcttaaacacatctagtggctcaatttagtctgtgcaagtatgagcaggatatgatttaacaacttgtccctgcccctgccttccccactgtaccactttctttcctattctgagacagatgcattgctcacctccaataattctaggtggagctttatacaaaactgaataaagtaggtctcaggctctgagcaggcagttttttttcctagaaatagaggtgccaacatgactgttggcagcatattacgggcactcatggcctctgccttccttggtaaggacagtagctgataggctgaggacagtctaggactgggagaagacagtggggagggaagaggggatgaacaactggtcatatgtgacaaacactcaggtgtaataagaaggaagaggaaaggaaccagattctgactcctgcctttactgaaggtttaacccctgccccaaaagttcttggaagctctcttacaggtcagctcaggggaccaatcttgttatttcttctcatttacgggatccagcatgtcacagagggtcattcaatcccaaccagcaatatctacgcaggagggtgagaccgtgaaactggactgtgcatacaaaactaatattgtatattacatattgtattggtacaaaaggtctcccaatgggaagattattttcctcatttatcagcaaacagatgcagaaaccaatgcgacacagggtcaatattctgtgagcttccagaaagcaactaaaactattcagcttatcatatcatcatcacagccagaagacctgcaacatatttttgttgtctcaaagagcccactgtgaagaacatgttagaagagccttacaaaaagatcggaactcaacctgaggcaattgcctattcccacattctcaggaaaaactcacaaaccttacccaggcatttgttagcagctggtggttagggtgcataagataagacccagaaaggaagtcattgagttcattccaggaagcacaccctcacaactgccttagaaaccacacaggaccacatgtaaaagccatactgctcggatgacatcacatctctatttcttcccatggagtatgccgtttaaaaaagcaacatgtgaaacatggaattttaaagcttaattgattgtacaggactttatatctgctcaaccaaatctcttgaggaaaatagtatggaagacactagggaaaaaaaacacgcatacaaaataaagatttttatggcaggatccctaaacactggccagagagatgcaatcttggtgagactatagactggagtacttttggaccatgtagaacagcagcctattctggaccagatgcatttttctatctccttggctacatttcactctaatcctgccaactccagcttggcttaccatgctttctgattctcatgttccttgcagctgggtctgctagttgggtcctccctgcagtcacatgcctatcacaagatttggttaaccacaacagagaaaggagatatgtggggagacactgctacagatgctaggatctgtagttaatcttgtagccacctaactaattcatggaaactccagaaatgagactgcagtttctaaatcccgtatttctttattcagtccccaaacccaattgtttcggtcaagcacataagactagtcttctgactctgatgagtcatttttcttccctacagattctcctaaaaatccctcctatgaatcctctgctaaggatgctaagtgaaccctatcacatgtggctgcaggcctgacacagtgcctaagccttaaccttcctcttctcttaattctgtgctctcagctaaggttttgacaacttgccaacaccaaaactggaatacacaaagtatctgccctttcttggttgttacctatttcagagcaaactggacattcctcctctaaaattttatctatctgaattcaaaataagattgccatacttggattcttactctcattggttcagtcaatcacttgttcattcaggaaatgaaaatatgtcctacgcaaagctcttcagttgcttctaattgtttcaagagaaatatccaagttctcttgtatggattaaaaattgtttctctccatattttttttattaagcccaaggtagataaaaatgtggagactgctctgtagatattcataatatccataatcgcatcttcaaaatctatgaagagcccagagaaaacccatccgaaccaaagtaaattgtaattatctaattcctcagccttgctatgtttcttgggatttctccttattgagtccaaatttactaccatgactcacaacctaactgaagccacagaataaataactcagacacttgccaattcttccatcaagcggcccaataaagactctagtctctgtgagacttttaacaattaaatataaaattctctcaacattttttgagaaaagaccttagtcttcttttaaaagaaaatggaagggaaaatggtgcagcagaagggaaaacaatgccctccttctcagactgaataggagagaggtatttcaattatgatctgtgatgtacagtgataatatgatttgcaatgcttcttatggttcagagagaatactgacaaaggtcttgcgtttctgataccaatatttcaattttagatgcaatggaagatggctagagttcccattcctgctagaaaagagtgttgcttctgcctcaataagtaaagctggataaatagaaaaattgtaactttgctttaacccatcagagacctgagattacagggcaaataagtaggctggactccaatgaggaaaacactcctccaagggagacaggcagcttatggactggcacaactgcagcagagcatagaaaaagaaatgttatctgccatacaagcaagaaaaagaaactgggtaaaagattgagtgagagctatcatcagaatatagaactgctgggagttgcagacatagaaggagtttatattcactggtagggccatttcacagatgttggaagaagtaattaggggcagggtgagacacagagagagccccagcaaaagtgtaggcttacaagacataattggcagtcactgcaggaaagcacaaatcccagcattcttgcctaaatcagcctcttgcaggaggaaaagctttaagctgttggggatggggctaaagacctgacagcgcattctgtcaccccctagagcacaggttaagatccacaacagcaaagaaaagagtcaagggaaaaaaatctctacctttgggtagagacaggaaaccattctgagctgaagaccctgtaacaataccattctaattttgctacctgtaagaaagaagcagaaaactctctcacaccacacccacagagaaacacggcagtgtttggctgccacagggaggaaaggtatgaatgctgagaaaaccctaaatccaagatccaagcacatggggccagtctaagattgaagctggaccaagacaacagagaagtccacctacccacacagcgagcctcgtaagcactaaataacaagcaacggcaaactattgctagaggagtgaggggtgaggaacagaaagagagatcctctttgtgctgaaggaattcagggacagctaaaagctgaggtagagtactctaaaaaatagagattcataaatcaatagtaattcaagaagccagcttttaagtggctcacaaagcagtaagatggttttaggaaaacttatgtatttaaggatagtattctagaccttctattttcagatccttctacttcctactttctattcctggagacaacatggttggataccactatcagagccatattaggctgactgaaccaccattgtgacttgcattatattatcttctctcaattctttatctccgtggagttttaccttaaaagatgttcattcatatacttttattcactaggtataactatgaggaagctgataaaaagggatgtttctcattagtcttttgtttatctaagatttgttgtaggttctgatacattagcagaataatataatcaatactttgatttgtttatcagatctatctaggttcatatgctacctctttgtgttcttgaacttcttcgagtctttgaggattaaatgaaagaattgatatcaaattaaaagcacagtggttggcatgtggtaggcaccaataagccactaataacagctcttgaaatacgtcatatcctttcattgctcctttacaacattgagtttataacagggaaaaaaaataaatattattgcacagactccaagagactatggactgggactcgagtgcataacattttttacttgcaatgtacattgctgaaatctagacaccccaaacttcctgcatctgcttaggcttttcaatcacggaagaccactgcactctggcaggaaaaatatccagatgcctaacttggaaaataaactaaattaggccatcttgggaaatggcatatagctctttggagggcaactttatatttaccctgtcttctgatatgttgaataaaagaagtttaaatgagacatctgctttagtatttggcatattgatataggtgagctcttacactatgaaagtatattggaaaggatatgacaaagaatatgctgctaaaatccctgaaactcgttaacacttaaaagtggttgatttcaataataaatttcaggcatctcaggaactgatttcctcaaaagtatgatttatagccatctgattgtgaaggcatgaacatcctcattctttgacattaaaggagaaacttggcaattagagggagatgcatgggcttgattctagtcagtaaatggttcaggcagagacaatgacattaatctggggctttttatattggaaaacacaagccaagaaagaaggtgcaaatatctttgccataataatgctggtgttatgatttcacaagaagtaggtgtgaatatgttttactaatgaaaaaaatgcattcattcctcagatagactacaatgattggactatcaaaggaaaattagctttttaaatactaagttgtgtgttttcatgtacacgtatacacaagtcctggctgtagctttactgatacagagaaaacaaactgaaattgaagcactgacaattttcacctaccctctacctttttcatggcagcagagctcaccgtgtcttgcaaagttgttaatagctcaagcaaacaaagaccccattgatatccaatatatgtgcaagatcccattgatatccaatatattaaaaagggactttgatctgagctttattatcctgtagaatggagtgctaatgtcttgaagtacaatggagctagtataccaaatatcatgagcttaagaaccaatagagagggaaaaaatgagacaaggaaacaaaaattttgatgtgtgatggattctattggtctatccattgaagccttgctatatcaagataccttttaaatttatactgttcagaacgcatattgaaactgtcagtaaaaaagatctctctactcttccaacagagtccattgtatatttggtacaaaaataaaacatctaaggttgtattccattcttttgaatggaagctcagattaaagtcccttttaatgtcttgcacatatattagatatcaatgggatctttctgccagccagcagataattccccaatgcagatgaaacctgttttaaatagtacttctacttcagaaactagttactaaaaatctctttgggaaaaagtcaggcacataattgtgatgtgtgatggatttccttgtctcccaattttttctctccttggttcttaaaccgatgacatttagtataccagctccatggtacttcaggaccatgtacatcaatcctctctacaggataataaagctcagattaaagtctttttaaatgtcttgcacatatatcagatatcagtgggatctttctgccagttagcagataattcctcaatgtggatgaaacctgttttaaatagcacttctacttgagcctgagaggcggaggttgcagtgagctgagatcacaccactacactccagtctgggtgacggagtgagactcagtctcaaaaaaataaaaaatatatagcactcctacttcagaaagtagttattaaaatctctttgggacaaaactaggcacactgctctgaatacttcatgaaataataatttttccaacgcctttctgagccaggtgttcctggtgttactagaatgttggtcagttctgcacaaatttacctaatttacatcctaagatgctctaccttttctttgcaatagccatcaattatgccccaattttttaaaataaatctattgataatatcatggaactggatgaggaattctaatattaagtctgcatgccaattcgtccaattactcagtagaggaaagccttccaattgaacttcattgtgtgcctgcttttgtgcttcttttatttaagcattttgaatatatgagactactttagcccttctattccattctcatttccttttcatccagttaaacttattgagagcctaaaatagaaaattcaacacaggcagtcctaaatttccaaaagaagatttgcaactaatggtagaacaaagaagcaacaaatttttttttggacagttttacattattgcctgggctggagtgcaatggcacaatcttggctcactgcaacctccacctcccgggttcaagcgattctcctgcctcagcctcccaagtagctgggattacaggcacccgccaccactcctggcttattttttgtattttttagcagagatggggtttcactatgttggccaggctggtctcaaactcctgaccttgtgatctgcccaccttggcctcccaaagtgctgggattacaggcgtgagccactgcgcgcagctggaagaaacaatctttataatgtttcttaggaacaccatctgggctgggcatggtggctcacctgtaatcccagccctttaggaggctgaggtgggtggatcacttgaggtcaggagttcgaaaccagcctggccaatatggcgaaaccccatctctactaaaaagaaaataaaaaaattagccaggtgcagtggtgcatgcctgtaatcccagctacttggcaggctgaggcaggagaatcgattgaacccgggaagtggaggttgcggtgagccaagatcatgctacttcactccatccaccctgggcaacagaccaaaactccattaaaaaaaaaaacaaaacaaaacaccaccatctgtaagacatggttgaccagaaacagaataatgcaaggttggccaacatagccaaactcttctaagccatgagctctgcctctgtctcattgattggtgcctagctgctagagttcagtgataaaagtgaaatcaaaggctgtacattatttattttctttgactatgagtttatctttcctgccagatccaaaatgactaataaaatgagagatacagtcagtctagactcgaaccaggaagagtctctaaaatccaaatgagtaactctaatggtctctctgaagactctgcactgttgcttctttaaagataaacattaaaatagaaacccgcatctctaataaaatatttgtctttcccagactttcttgagagtgagtctggagtgaccattttgtggtaacagatcatcatttggggttattatttaagcaccagttccctcatatttgtgctgtcagtcacttcctcaaagcttcccattcagtatgttttaacttaagactcagaaggacacattgatgataagaagtttctcagtgggtctgaagcttagctccaacactgcttgtcttagaatagagactttatcttactaggacaccaaagaagactgttactacatggcatgaatatctgcttcttctttatttaaaaaaaaaaagtgcagaaggcatcaatggataacattctctatgttttcatttgagtctagtagttttctgttcttactttgtactgtcaggctttttttccccttatatctaccttaaaccctataaagaactactacagatcagaaactttaaatgcaagatctgtaacttaatcaccagaaatataaaccagaaatatgactttctactaatttcctacttgtgaagtaagatgttctaagggataggcagacatgccagctctccttctaaagacagaatgtgtgttatacacgtggccttggcaattagaggtctgtacacaggatggcagcacttcattttcacatgcagagaaatggaatgttcaactctgttgggcagagcatagcttgtctcctattggcttatagccaggttaagaaagagcaagaatacactgagaatagaatatgttctccttcccagatagtatagatcattgatgattctaatggcaagaagaatggaaaagtccctgggagctttattcaaattcagctgaagcgtaagtgcagggcttctggaggggtccatcacaagtctggggaaggagggggattcattttagttctcccctggttttctgctgatactctgcaaagaaaacgtacattcggaaaatgacccagtaacccattttccttgtttcaacggtgatgactggccaagaaaaggatgtgatacagagttattcaaatctaaatgtctaggagagagaaatggccgttattaatgacagttatacagatggagctttgaattatttctgttggtacaagaagaaaacggggaaggccctaatatcttaatggagattcattcaaatgtggatagaaaacaggacagaaggctcactgtactgttgaataaaaatgctaaacatgtctccctgcatattacagccacccaaccaggagactcattcctgtacttctgtgcagtgagaacacagaactcttcaggcacctgcaacctgtactcaaacctgcaactgggagtccagtcacattctttgtctttgaacgggttttgggttagaatggtttaccataatgtgcttgtttctaaattgaaatgaatgcagaaatctaataattgtgattacaaaatcattacgtttaaagtaactcaaaatgagctggtatactttgtactaactccaatgtattcgagaggagaagtagtgttgttttaaatagatatgtaaataataaagataacctcattggaatatctgaggttgtttcattgagatcctacacttccataataaaacaaggacacctaaaactcttctgggtggcaatctgctggccttcagaaaaaaaaagaagattcatttttgaaaaaattttaaaatttttaaatcatcatattttaaaatcatcacacactcattatttattataagtattttcattccaggtgtgtctgcatatgccctaattcatagcaacttaacatatcaagtatatttatcatataacatttatgtccattctcctctggacatccaccttcatagtacgggtattcagtcataaaagttacaattcaaatagccaccagaagaattcctgcaaagatttttgtcttgcaactgttctacattcagaaaatatttaccaactgcctactctgtgccagacattgttcttggtgttgaggattgagcaggatgaacagaaagacatgacaaaatttaattgtattctgcttctctcctccaatggatgtctgctcaccagaaattaactggggaaacattttgatgacagtgtatatccagggatcaatgacaccacctaggagttttaggattttgcccaaattcaccaattccttcatacctcataggtctgtatgtacagtagcaacagtgtgatctttctcttttttccaatgttccttcaagaaaggaagataatagttattttagtcaaactgttcaaaatagagaaaaaaacctaccaactccctcatgaggcaaaaaacataaacaaaatctgtagagttaagagtagtgaggctgggcactgtggctcatgcctttaatcctaccactttgggaggccgaggcgggtagatcacttgaggtcaggagttcgagaccaaacttcccaacatggtgcaaccccatctctactgaaaatataaaaattagctgggcgtagtggtgtggacctgtaatctcagctactcaggaggctgaggcaggagaatcgcttgactctggaaggcagaggttgcagtgagccgagatcctgcctctgcactccagactgggtgacagtgcaagattccatctcaaaaaaaaaaaagagaaagtatttttcatataaattattctcggatttttgaataagtaataagtatacatggtataaaataaaaattatacaaaaagatatatagtgaaaagtaacttttctctttacctctatccccactatccccaacagcctagtataaccactgttacactgaaattttctttgaacattatacatatatacatatatatgatgtgtatatatatatatgtatatataaaaatgatgtatgtatatatgcttgtgggtatatatataacatatatattaatgtagcataccatccacactgttctgttaccatgctttcttacttaaactatatcatgggaaaccatcattgtcagtacatgaagacagctaccttattatttttaatctaaattttcaaacacacacaaactaggaagaattgtataatgaactcctttgtatctttcattcagctttaacaaccatcaactggctatctccttctctttaaagtttcaaattttgccattgtgtgactataccacattttatttagtcaatctcttgttgatggacacagattgtgttcaaattattagttttgtttgtattgtagcatagtttagtaaggtacacagatctcaagagtacagttcaatgagttctgacaaatgtatatgccatacaaccatcactgaaactaaaatatagaacatttcccataatcctgaaaactctctcatgtttcccccccagacaacacttccactaaagtaagaattgttcttatttacataaaaccatagaatagttctgtttattctattttgataaattgagatataattcacatagcataaaatccatgcttttgaagtataccattcagttatttttaatatcatcacaaatctgtgcaaccatcacaactaattcctaaactttatcatcactcgccaaaaaaaaaaaaaatcatacctattataagtcactctcatcccctcctcagcacatctgcccctaacaacgccttaatctgctttctgtctctatggcctatcctagatatttcatacatatggaattgtacaatatgtgacctatcatgtcacgtattgtatgattcacatattcacatattttactggctttttcacttaccataataatttcaaggctgaacatttgtgaccaagtttttgtgtggacatacgtttttagtatttggggtattatgcataaaaatggaattgtgggtcatatggtaattttatgtttaactttctgaggaactgccaaactatttttcaatgtggcttcactactttacattactgtcagcagtaagggaggattccaatttttccacattctcatttgttattgtccgtctttttaattagacccatcttagtaggcataaagtagtatccctctgtggttttcacttgcaattccctaatgactaataaggctaagcctatcttcatgtgcttaatggccatttgtgtacctgctttagaaaatgtctgctcaagtatttgggctgtttttaattgggttgtcttcttattgttgagttgtaagaattctttatatgttctggatactagacttttatgagacatatgattggcaaatagatgctcccattctatagattatgttttttttttttgctttcttaatagtgttttttgaagcagaagtgttctaaattttaatgaagtctaatttatctattttttctttagttgctggtgctttatatgtcatatttttaaaaacattgcctaatccaaggtcacagatagttatatctatgttttctaagagtttcatagtttcagtttgtacattgaggttattgctccacttcaagttaatttttgaatatggtgagaagtagggatgaaagttcattcttttgcatgtgaataataagacatttggagtccccaaccaaaagaaagctgggtagctatactaatatcagataaaattgacattaaaccaggaattattactagagacacagagcaacacatcaaaatgattgagtacgatctacccagaacaaattctatttttatatatacctaatggcgtagcttcaaaatatatcaaacataaatcagtagagttgaccagtagaattaaattggtagaatttattgattaaaagatcaataaataattatacaaccatcatgtcaggcattaacacacatctctcagtagaaaagtattgaaattatgaccaacacaactaatatcctttacctcacatacatagattgaatactttacctcaaaagaacagattacacaaggaatatttagcaaaattgactatattctgaaacataaagtaagccttaatcaatttcaaagaacttaaatcattcagaatagtcatagtctctgaccatatggtattaagcaaaaattcaataacaaaatgattattaaactttattcctgtaccttgctagatataaggttaatttttcaaatgtattgccacagaaaacaccaagacaaaacagagatttggggtagggtagatttttcagtctctgaatagagcaatgtaacatactacttgcacactttatttcctgtttgggggcagaaacactgaacttctccagggactttgcactcaggcactcagagaagcattttgtttccaggcttgagtgaggaagcaaatttcaaccataagaagaaattctaccatgctctgccctggcctgctgtgggcattcgtggtcccctttggcttcagtacctatgggcggccccaaacatgggactgcagcttcctcgagagctgggctgcacaaattggaactggtggagtattaagtaagaggtaagggaagtggggaaatgaaacactatttaattattttctttgtccttttgccataaattaatctagtcctcatgacccatctgagacatttaagggaaccaactctgttttctcctttttcccataggatccagcatggctcagaaagtaacccaagttcagaccacagtaactaggcagaaaggagtagctgtgaccttggactgcatgtttgaaaccagatagaattcgtacactttatactggtacaagcaacaagcaacctcccagtgaagagatggttttccttattcatcagggttattctaagtcaaatgcaaagcctgtgaactttgaaaaaaagaaaaagttcatcaacctcaccatcaattccttaaaactgactcagccaagtacttctgtgctctcaggaatcccacagaagtagaaatgacagtggaagataaacaaaaaccttagcactccataaaggaagccacctgctcaggagcttagggaaaatacatgaagcacagacaggaagaaggcacattagtggcacagttgagaccttataatgtaaacattcctctgtaaaaaaaaagtttccttattgagtttatatataaagcagcattctttcttgcgatttccaactattacgtttctatcttgggttaaagtaaatcacaaagtgtattagtcagggttctctagagagacagaactaataggagagttgtatgtatgaaggggagtttattaaggagtattgactcacacaatcgaaaggtgaagtctcacattaggccgtctgcaagctgaggagcaacgaagatagtcggagtcccaaaacctcaaaagtagggaagccgacagtgcagccttccatttgcggtcaaaggtccgagagctcctggcaaaccactgctgtaagcccaagagtccaaaagctgaagaacttggagcctgatgtttgagggcaagaagcatctggcatgggagaaagatgaaggatggaagacttaacccgtcaagtccttccacattcctctgcctgcttttatcctagttgagttggcaactgattagatggtgcccacccagattaagggtgggtcagcctctcccagtgcagactcaactattaatttcctttggcaacaccctcacagacacacccaggaacaatactttgcatccttcaatccaatcaagttgacactcactattaaccatcatacaaagtgctttttaaaatcgttgctgaacaataagattaaatgaacctatgtatttcatgaaattcagaagcagtttgctgattctcatcttaaactgttgaatttccagatttgaagtagcactataaaccattttatcttccaatctcatgttgattttagcagtttttataaatattatcattttatttatttatatattttatatataaacaaatttcataaatacataaatttacttttatgtattttaatatataaatacatggtttttattgtattcagatagataagaaggcaattaatgttttgaaagaaatggatgaccaaaagaagctttgactaaaacaaactatgattgttagagatagaaaataattcttgggtgcttcataagcccagcagaaggtgggctgagaaaccaatttatccaccaaggcaggcatattccttaatatgtggtcaaaggagataagagaaaaagaatattccagaggactgagccagagaatgtaaaaaacaatgggcaaaataactccctgcatagagtgcagtcagaatctcatcaaagcagggtaggggtcttcataataatccaaaatgaactaggtatgtgcagaaaataattaacagtttttgtaacacactgagattttggagttgattattgtagcaggataacctagttactcaacttatctaaatacagagaaaaaatgagaaaatgttttcccaatttattttacaaggccagcatgattttgatactaaacctgaataaagaaatattttttaaaaaattattatgggataatctcactaaatgaacataaattcaaaaattctaaacaaactattagtaaaaagaattagcagttataaaaaagaataacatatcacaaccaagttgggttttatataatctttatataacatcttaaatgaattaaagtaataattctcattaataaaaacatgatttaataatctcaacagttacacaaaagtttttaatacaaagtaaatattcattcataataaagagataaatttatggcaaattaggaatagaaaaaaaagtcctcattctgctaaattatatgtattacaacaaagcagacataaaacttaatgaaaaatgttgaatgctttatttcaagaaagccaaaaaaacgctatccctattaaaaaagtatactgaaggtcctaaccaatatttaagaaaaataaagaaataaaagttttaataattagaaacaagactataaatattagccacagatggcatgactgtgatatatacaattccaaatcatttgcaaatatatattacattactgagtttagctatgtagtattaaaaattacattttatatgaaagcaatcagaaattttaaatgaacctttaaaaagtgtccttaaaataggtggggtgaactgggggtggagggttacgcctgtaatcccagcactttgggaggccgaggtgggtggatcacgtgaggtcaggaattcaagaccagcctggccaacatggtgaaatcccatctctactaaaattacaaaaattagccaggcatgatggcccatgactgtaattctagccactcaggaggctgaagcaggagaatctcttgaagctgggaggcggaggccacagtgagccgagattatgccactgcactccagcctgggcgacagatcgagactcgtctcaaaaaataaaaataaaaaaataggtggggatgactaatgggtacaaaaaaactgcaaagaactaataggacctatcatttgatagcacaacagcgtgtctatagttaataataatttaattgtacattttaaaatcactaaaagagtacagttagattatttgtaacacaaaagataaatgcttgaggggatggatacctcgttctccatgatgtaaacttttttttttttaagaaagtctcactgcgtcacccaggctggagtgcagtggtgcgaccttggctcactgcaacctccgcctcccagattcaagtgattctggtgcctgtctcctgagtagctgagattacaggcaagtgccaccatgcccgggtaatttttgcatttttagtagagacagggtttcgtcatgttggctagactggtcttgaactctgacctcaagtgatcctcccgcctcagcctcccaaagtgctaggattacaggcgtgagccacatgcctggcctctatgatgtaattatgcattgcatgcctgtatcaagacatctcatgtgcctcataaatatatacacctacaatctacccacaaaaattaaaaattaaaaaatgtaacatgtatatatccttaaaatagcataaaaatacaaaatacttaaaaataaattttaaaagatatttgcaaggcctcaagacaaaaggctataaaacattaaaaaacgaaattaaagatctaaagaaatgggagaattcatcatgttcatgaattagaagatttacaatgcaaaggcatcaattctcgcatatttggtaaatacattcaatgaaatccccatcagtatcaagagtgtgtgtatatacaagtagattctaaaatatatagtttttaaaagtcagtaatactcaaagcactccgagagaagaagagcaataggaggacttcctgtccctgacaataagcctatgaaatttaaaatatggtatggaggaacaggaacacactcagttacagatctcgtcagctgtgtgtgttcctttttcctctcatatccactctccacctttctcttccttgctgtttgtctcacgaggctgacctgaatgaaccgcatcaacaaggctcccgtgccctctgggttctagtggatttttgccagtgaggtgccctttgccaaaatctgaaaaaggtagcagagtaaggtcagggtgtttgttccttggttctcctcctgaggaatctcttctagtggcaaacatcatttgttcaaagatcacagctcctttcaacttggctctctccacacacccatctccattcaggttttgatattcctctctgccctctggacatagggatagtaaaactccactggcctaaagataataaaattaaaatgcagatatttctcaaaaatctcatagagaaagaagtctgaggattcaggtaaatgggaatgtggtaatggaattatctgatgcaatttaatcagatgcctgctaaccatactccctgggaatcccagaggacccttctttcaccaaggaatcaggaaattcatcattgagtgggtcaccagaattcttaaaatatttcttggaggccatccaacctctatacagtgaaggcaatggggacggggtgggcacattgccatgtaatttgctttcctggatttcagtgggtgtgactggatcctgttgcgataggtagtggagtttaacagatagagacaaagatagagtttaacagatagagaaagagtattaatcagagtcttttaacattcagagatttttggagaaagctaattaatcatagaatacctaggaaggaaagacagaatcagcttcctgaggctctactttatattatctagattttttgaggaaaaaaatatagttttagtagctataatggagattaataggcccttaatcaatcccaattgagaggcctaaaacatctgaactgagggaatggttgcatccatttgagaaagattatgccagacaatatcaagcattggcaaggatatggaacaactgaagctcttatatatttattatgttggcgctaggaatgtaaaattgtgccaccactttgaaaaatggtttagcaatttttataaagttaagcatgcatatactgtatgatctaataatttgcacccatagattgttaaccagaagaaataaaaaatatatattcacagaagtatttatgcagaatgtatttgtgaatagaaaatattcacataatattgtttatttcttttggataaatattcagaggtgctttattcattataggtcataactggaaaaaaataaataggaatgagcaatttatatatacaataacatggatgcattttaaaaacattacatggagaaaaatgtcagatgaaaagagtttatactgtttgtatccattaatttgaaactcgaggaacagcaaatttaatccatattgagagaaaacagatcagtggttgtctggattctgcagttggggaacccagacaaccactgattgacaggtagagaacacagaggaacaatttagggtgaaataattgttctgtgtcttgatttatacaacagttacatgttctataaatatttcaaaactcaccatatttcaaagcacttaaaatgggttcattttactgcatgtaattcatacctcaataatgttgatttttttaaaagaaataataaatattgctacatgccaaccaaaatgtctaaaattaaaaaagaaagacagagctaagtaatgaagagaatttgaatctactcaaacaagtaagagtgtaaattgataccaatacttaggaaaattgtttaacactaatttctcaatttgaatcataactgatgaaaattattttttaaaaagccaaagtctgggaaatcgtcctaagggcataccaaaaatggagaagcatttattcaagaaaatctactgaatctactaaatgtcagcaaacaaaaataaataagatgtgatatatatgtatacacacacacatataatagaatattattcagcctaaaaaggctgtttttatggatacaggttcctttttgggatgaggaaaatgttctaaaattgattgtggtgatggctgcacaactctgtgaatatactgaaaaacattgagttgtacactttaaatgggtgaattacatggtatgtaaattgtatcttaatgaagctgttacataaaaataaaaaagcaaagcaaaaggtaccacaatatttattgttcttttctagactcagtctggattctccataccatttgaatattgcagtaatgaacactatatgtttgacttttgtataatataactagataacatagagacatctacatttcatatttcttttcacaatcccaattttttaaacctatatatttataccagtactgaattattagtgtcatttttaatctgacacatatataacatgacacagtgaacagctgtcaaattaagtgtcactatatggctattgtgtcatatatggtcatattctaataaccagtctttatgtattatagatttgtgaatttttcttttttggaggatggagaataaggtttggtgtgctatttgaattttgctcacagatctaatctggcattttcacttttacttttagatagttttgttcaatttgttttcaaaaaaattagaagctttttgggggaacaattgcaagagtcattccatataatttctcccaataatgttatgagtaaataaaaattaatatattcacccaacaaattaagttctcaatctgtgccaaatcctatgctatacaatgagtaacatgagctttgggaactgccttcaaacatgtgaagaaccagataccacagaaaacaaaaggaatacattaattgagaaaacatcacataaataattttggggggggcttcctttattttattttattaaaaaaattttaaataggtttttggggaacaggtgctgtttggttacatgaataagttctttagtggtgatttctgagattttggtgcacccatcacccaagcagtgttcactgtacccaatgtgttgtcttttatccttcaccactcccacaccttcccccgagtcctcaaagtccaatgtaccattctcatgcctttgtgtcttagagtttagctcccacatatgagtgagaatgtacgatgcttggttttccattcctgagctacttcatgatatggtttggctgtgtccccatcaaattctcattttgaatttccatgtcttgtgggagagacctggtgggaggtaattgaatgatgcgggcagggctttcccatgctgttctcatgatagtaaataagtctcataagatctgatggttttaaaaggtgttcccctgcacaagctgtctcattttttgcctgccaccatccatgcaagatgtgacttgctcttccttgccttctgccatgattgtgagacttccccagccaggtgaaactgtaagtccaattaaacctctttcttttgtaaattgcccagtctctggtatgtctttatcagcagcatgaaaatgggctaacatagcatattggtaccagcagagtggagcattgaagaaaagatgcttgaaaatgtggaagtgaccttggaactgggtaacaggtgcaggctggaacagtttggagggctcagaagaagacaggaaaatgtgggaaagtttggagcttcctagagacttgttaaatggctttgacaaacatgctgatagtgatgtaaacaatatcatcttccaggataaggtggtctcaggtggagataaggaacttgcttggaactagagcaaaggtgactttgtcatgttttagcaaagagactgttggcattttgcccctgccctggagatttgtggaacattgaacttgagagagatgatttacagtatctggcagaagaaattcctaagcaccaaagcattcaagaggtgacctgggtgctgttaaaagcattcagttttataagggaagcagagcataaaagtttggaaaatttgcagcctgacaatgcaatagaaaaggaaatcccattttctgaggagaaattcaagccataatgaagatccaaatgttaatcctcaagacaaatggggaaaacgtctccaggttatgccagaggtcttcacagcagcccctcccatcacaggcctgaaggcctcagaggaaaacgtggtttcatgggctgggcccagggtcctcatgctgtgtgcagcttaggaacttggtgctctgcattctggctgctccagccatggctgaaaggggccaacatagagctcaggccatggcttcagagggtgcaagcctcaagccttggcagcttccacttggtggtgagcctgcaagtgcacagaagtcaagaattgaggtttgggaacctccacctagatttcagaagatgtatggaaacgcctggatgtccaggcagaagtttgctgcaggggcagggctctcgtggagaacttctgctagggcagtgttgaagggaaatgtgggattggacccccacacagagcttctactggagcactgcctagtggagcagttagaagagggccaacatcctccagaccccagaatggtacatccactgacagtttacaccacacacttagaaaagctacagatactcaatgccagcctatgaaagcagccagtagggaggctgtaccctgcaaagccacaggggtggagctgcctaagaccatgggagcccacctcttacatcagtgtgacttggatgtgagacatggagtcaagcgagatcattttggagctttatgatttgactgcaccgctggattttggactcgcatggggtctatagcccctttgttttggccaatttctcccatttggaatggctgtatttacccaatgtctgtaccctcactgtatctaggaagtaacaaacctgcttttgattttacaggctcataggtggaagggacttgccttgtctcggatgagactttagactgtggacttttgagttaatgctgaaataagttaagactttgggggactgttgggaaggtatgattagttttgaaatgcaaggaagtgatatttgggaagggtcggggtggaagtatatggtttggctgtgtccccacccaaatctcatcttgaattcctatgtgttgtgggagggacccagtgggaggtaattgaataatgcgggcaagtctttcccatgctgttctcatgatagtgaataagtctcacaagatctgatggttttaaaaagaggcattcccctgcacaagctctctctcattttttgcttgccactatccatgtaagacatgacttgctctttcttgccttacgccatgattgagaggctttcccagccatatggaactataagtccaattaaacctctttctttgtaaattgcccagtctcgggtgtgtctttatcagcaccgtgaaaacagatgaatacacttcacttagaataataatctccatttccatctacgttgctgcaaatgccattattttgttcttttttatggctgggttgtattccatggtatatatataccacattttctttattctgtcattgattgatgggcatttgggctggttccatatttttgcaattgcaagttgtgctgctataaacatgcatgtgcaagtatcttttttgtacaatgacttcttttcctctgggtaaatacctagtagtgggattgctggatcaaacagtagatctacttttagttctttaaggaatctccacactgtttttcatagtggttgtactagattacattcccatcaacagtgtaaaagtgttcccttttcactgcatccaaaccaatgggtatttttttaaatttttttattatgaccattattgcaggagtgaggtggtatcacattgtggttttgatttgcatttccctgataaataatgaggttgagcatttccagatgcttgtgggccattggtatatcttttctgagaattgtctagtcatgtccttagctcactttttgatgggattgtttgttttttcttgctgatttgagtcattgagttagattctcgatattagtcctttgtcagatgtatagattgtgaagattttctcccactctgtgggttgtctgtcaactctgctgattgtttcttttgctgtgcagaagctttttagtttaattaggtcccatctatatatctttgttcttgttacatttgcgtttgggttcttggtcatgaagtctttgcctaagccagtgtctagaagggtttttctgatggtatcttctagaatttttatggttttaggtcttagatttaagtccttgattcatcttgagttgatttttgcataaggtgagagatgaggatccagtttaattcttctacatgtggctagccaattatcccacaaccatttattgaatagggtgtcccttccccacattatgtttttgtttggtttgtcaaagatcagttggctgtaagaatttggcttcatttctggcttctctattctgttccattggtctaggtgcctatttttatactagtaccatgctgttttggtgactatggcattagagcatagcctgaagttgggtaatgtgatgcttccagatttgttcttttttggttagtcttgctttggcaatgtgggctcttttttgtttccttatgaattttaggaaataattctaaaaccccaaagtgactgaaaataatttgatctttcttagagaattatggtaggaagctctttgctgagccttgtcactagagggaggtagcacatccaaaataatctatctttagacctgaaacacaaaccctgaaagattgctaactgacttggttcctagttctatgtaaaggagttcacatatacagtcacaagagggagctgttacagctgcaaatccaagctccttccagggtgagcgaggttgtcattgagttgtataaggaatttatgttcattctttttgccaccttgtgctttattatctctttttgagtgtgtgcacagtttcaaagacatgggtaagccccttcccaaatgcagagcagaagtgaccctgaatgggaaaaacagagaagtgattaatacatagctcaattttaaatggtgaaatatttgttgctataatggactgacaagcttagttattgtagcagagataatgagtaattttaattttattccttcccatttctttaataaccacttttgaaaataactagaaaaaccccttcatagttacttctacctctcttatcaaatggcatcatttgatttccctctccaaacctcttcccatttcttcctttctccttcaatgtatgccactcctaggcatcatgaagatgagaaagcatatgttaaagaggagttcaagtggcatagaaataggggtcattcaagccattggctcctgtctcaaaaccagaggcacaggcaatgtctatctagaagacacttaggacattattccaggagccagtgtgggagacctgagtaccaggaaacttggcttctaacctgagttctaaatttgttctttcctttcacacttagcacagcaatattatacaattatgaaattacttttgttatatatgttgcaaataccttctttcattgtgtcatttgattttcaattttgcttatggtaattttttttaccaaaaagaagtttctaactgttgaaattaaattatatgctactgcttcttctaagacttactcgccctgaagatgtggatagaaattcccttctttcccttacagcacagggctcacatagacttcttggaataaagggctgttcttaccagctcaatgggttgtcaaactaccaattaatggtgggttttgtccttaccataataagggatgggtaatcccatttacttctttagatgtagcctacttgagtttcagccttgaaaatgatcttaatggaaactttctgaattaaagctagatttaaagaaaatattcttcccctctttttaaagttttatttttttaattaacaaataataatcgtattttatcttcttttaaaatgtatgtttaaacctgggggtgggctagacctaaccaggaagctgctctatctttagctgacgatttctggggagcactcaaattgaaacctgcctgatgtgggatgtgctgtggctgctgctttgttgcttgggacctcctctgacctaggatcagacacagagtctgagttctggggcctggaacctcaatgtgcacttgaacaatgaagttggtgacaagcattactgtactcctatctttgggtaagtgttctgggcctaagaaagcatagttttgtggctaatgacaaaagagagttatctgctgtctccatgttttctaccatgatttaccaattgcgggaaaaaatttgtttctatgtgtttcttgagggtgtctgagcgtcagtgtgaggggttggtcatatccactactcagagaagattctccaggtctcacagctctcaagctgtaaggagttttaggttcattgagctcaagggtcatggaagatgggaaatttatttttggccttgtggctctgcatagctcaggaacaaataaataccagtaatatttatcttgtcctgtgcaacacacataaaaacactcaaatatggagtagggcagggaggacagttctggagcagtggtgaacctgaccttcagatgcaccaagagctgatgatccagagctaatctgctgtttttcaaccccataggtattatgggtgatgctaagaccacacagccaaattcaatggagagtaacgaagaagagcctgttcacttgccttgtaaccactccacaatcagtggaactgattacatacattggtatcgacagcttccctcccagggtccagagtacgtgattcatggtcttacaagcaatgtgaacaacagaatggcctctctggcaatcgctgaagacagaaagtccagtaccttgatcctgcaccgtgctaccttgagagatgctgctgtgtactactgcatcctgagagaccacagtgggacagatggggctgcagctgtgcaatatctccctggtgatgaaagggaaggcatctaacgaggccactgcacaagaaggagcagaagtttaatagaggaagaagaaaatttaaagaagaaaagggaaaagaagtaaagaggaggtggtaaggaaatcaatgagaggatgagaggattaaaggaatgaagaaactgagaaagaatagctaagaagtcctgaagaaaggactgagaagcttggcgaagagatgaagaatcacaattggaattctgcagtcaggaagaaaggaaataagaattttcccggacgctttcttttaatcaactcttgctttccatgtagacctcactataaaagatgagaaccatcatctggtagtcccaaagcatttcttcatctagccccaggcaagtgcctgggctttgaatattatatcacattagtccttccaacctctcaataattgaaatgaatttcagaaattgattcatttgcccttacgaaaaatttgaaattttatttgttactcatccatagcacatactcttgggatatagatgatttctggaagggagcaagaaagtggtggatatgtgaatattgatttcattttttaaatctatgttgaaatatctctattattaaacaaaaatacacaaatcttttttcattgtaaaagattcaaactattaagtatgcgaagtaaaaccttagaggcccaaactgactgtctccatctccatcccattttctcttcaattcctacaataacccattttgacagtttggagagtgccctgatgatcatactccttttcatttatgtggatactcacataaatatctacccaattttattacataagttggaacataccatgtgtatttgtctgcaacttgcttttatttttatttaaaaatagttttttgaggtgtgttcataccgagatacatgtgtatgcatgtgtgtataaactggccttattcttttcaatatctacaaatgttcacagtatggttgtataataattttacttacctcacctatatcatctctacatatataaatatatatgacatatgtgtatgtgtgtgtgtatgtgtgtgtgtgtacatattccttatagattccgaagtggaattactggatcaaaagatatgcctattttatatttttatagatattgaaaagttgcattccaaaatggctttaacagtctaacccaagatcaggaacatggcaaaaatgtctactctcaccgtttctattcaacattatcctagagaatctaaccaatgcaatgagacaaaaagaaaaaggaaaccaggctttacctattacagatttgtgagtttttcttttttggaggatggagaatgagggttggtgtgctatttgaatttttcccacagatctaatctggcatttgcctttactttggatacttctgttcaatttgttttcaaaaaattggaagcttttttggaataatttcaagagtcgttccacataacttctcctaataatgttatgagtaaatagtaattaatatattcacccaacaaattaaatctttaatctgtgccaaatcctatgctgtacaatgaatgacatgggctttgggaactgccttcaaacatgggaagaacaagataccacggaaaacaaaaggaatataataattgagaaaacaacacagaaataattataaaagctccgaagtgactgaaaataattctgtctttcttagggaattgtggtagcaagctctttgctaagccttgttcctagagggaggtagcacatccaaaataatctatctttagacctgaaacacaaaaccctgaaagatcgctaacttgactttatggtaaaggaaaccatatttaactttttaaaacgtaactcattttgcaaacaatagaattgtctgtgtagcaaatcctatagacaaaaaaactactgtaaccaataaatgagttagataaaattgcaagatacaagctcaatatacaaaataatgctgcttccatacagtaacactaaacaagcagaattgaaatttatatagatatgcatatgtatatttatgcatttatatatttatgcatacatatgcataaaaaacttttaacaaaattttagcagactgaatctaacaatatataaaaaggataatacataataatgaagtggggttcgtctcaagaatgcaatttatatgtatatgaatttcaattctgggccaggcacaggggctcatgcctgtaatcttggcactttgggaggctgaggcaggcagatagcttgaggccaggaattcaagactagcatggccaacatggcaaaaccctgtctcgactaaaaatgaaaaattagccaggtgtggtggcacacacctgtaatcccagctactcaggaggctgaggcacgagaatcactggaacctggggggcagaggttgcagtaagccaagattacaccactgcattccagcctgggcaacagagtgagactctgtctcaaataaataaataaataaatttcaattctggcgtgtgtgtgtgtgtgtgtgtatgaatacacttgacagaagttgtctaaggcctgtacactaaaagatataaaaaaattctgagatacatttaagatctaaataaatggaaagagttattgtgtttgcagattagaagactcattaaaattctctccaaattgacctacagattcaatgtcattcaaatcaaaatcccaacagaaattttcatagaaattgacaagtgggtctaagatttatatgaaaatgccaagggactacaacaaaaaaattctttttaaaaaacacaaattgaggaacttacactactgatatgaatacttttatagttacaataatcaagagactatgatattgatataaagatagacaagtagaacattggaacacaataaaggatccaataataggccagcatgtacatagttgattttcaacaaaaataccacaacaatttgttatgaactgaatatttgtgatctcccctgcaaattcatgtgttgaaatcctaacccccagtgtgatggtattaggaagtaggtctttgaggaagtgattaggtcataaaagtgtagccatcttgaatgggattagttccattcagtgaaaccctagagaactttcttgttctttctgtcatgtgaggacaccacaagaagactgccatctatgaaccaggaagcaggccctcaccagacatgagatcttccagcccctcgatcttagacttcccagccttcagaaccatgagaaataaatttccattgttttagtcacacagtctatggtattttgttatggcagcccaagctaacaaacacaatctcaaaataaatatgctgaaagaaaccggacgacagaaagcagatacggtatgattctgtttacataaaactctagaaaatctatagtaagagaaggcagactagagattgcctggggttgaataggcattgggatgatatattggaaaggtatacagaaaggattaacaaggaacacaaggaatagagacacaaggaaactttggggagtggtgcatatgttctttatcttgattgtgatgatgatttcacatttgtatgaccatgtcaaaaattatcatattggaccttgtaaacatatgtaatttgttatatgcaaagtgtacctcagaaaagtagtttttaagaaggctcaaaacaaaagtagacagagataaatattgaaaaataatcactctgtactatagagaacagaattttttactttctcttaattatggagggtaaactttctcaagcatgcaagggtaacatatgttatgagattatattttctttatctcataagtggcatattttaatgcaataaatagatctatgtcatatataaattaactccagaaaacctgtccattattcagcatttctcagtctggccaaagagtggcagtgttaaaaaagtatttgagtaagattgtacagtgctgaacaaacaggaatccaggtatggcttctgattggtgcaatctcctgcaccaatgagcaaagtaacttctgctggggaagctcattcagtaaaatctgatttaactgtgttttctaaatagctaagggatggagactgttctgcaagtactcctagggatattggggttccaagcagcctgtgagtatgtggttagtctgggagaattgcgagatggtgacagcatcctgagggcaagagtcgagtcatcttctgttctgggaaggcccgtttgagagccagatatgtgttgggaaaaaaaatgacaatactttgttttaatgtgacaattctgctgcctaggggaagtggggagggggagaaaaacatcatccctaccatgaccatgaaaatcttatgagggtcttctgtattttctttacattgtctttttgaacaggggtcagtagccaagaactggagcagagtcctcagtccttgatcgtccaagagggaaagaatctcaccataaactgcacgtcatcaaagacgttatatggcttatactggtataagcaaaagtatggtgaaggtcttatcttcttgatgatgctacagaaaggtggggaagagaaaagtcatgaaaagataactgccaagttggatgagaaaaagcagcaaagttccctgcatatcacagcctcccagcccagccatgcaggcatctacctctgtggagcagacacacagcgatcttcaggcctctatcagctgtctccaaacctgcagctgggccacatatgctcttctgacatggggctcctgagatgtggctgggacctttgccaagacatgaagtctcagaacgttgcaattgtcttattggaaaaatggggaggagagtaggaatgatacaagggggagctatatcactaatcccaaatttaatttgactttattgtctggtagttatgttactttttagtagatggaacatcaaattcgaatgagaatagcatgaatttcagtgatttatgcaagaactatgcacgaatattatgtccctgttgtgccaaggaacttctttccctttgctatttacccaccttgttaataaaaagaaattgtgcattgtttgtcagattctttgtcacagattaacattgtaccaagagtgttagaatatccatactgaggagtcatgggcaatagttttttctaagtttgtagtatagatatagaaaaagacaaatgtttagacagataaataggtgatagatagattataggaagctagattattagatagatgataggtagatagatagataataggtagattagatagagtgagctagagagaggggaatatattaataaatatctaatgcagtcttagactggcctccacttctcttctcattgtgctttcattcatattctagtctcagtattcttctggccactccaaattatcagcttaaagaattgtttcccagttgtctcagtatgaagtggagaagatgttaccttcatcctccactccacatcagaatagtgctggcctacagtgggtgtttacaagtattaaactgatactgaataactgataagatcataggttagagagaaataattcacatgtttcttaaaagctatgtgatgttgaccaacaactttaactttacaagtctttattttccctctgtaaagatgatacaatcatattattttattcatatgttcttgttaggatgaagtaaggttatagattacatacattaagtatctggtgtattgcaagccctcaatatttgagatagtatttttactattaatcaaacaatgacaatttcaagtaagtcaaaattctcacataaaagtagggaagttgatcaacatgatatggcttcaacctaactaggagatgttctattctttaaatttagaaaagaaaggaggaatataatggtctcctgtcatcagaaactgcctagtgacctggtttcaaaagaaattgcatgtaaaatgggaatgatcatttatgttggccaaagtcagggaagatttttaaaaatcaagtcgaattagattattttctgttttaaagaaatgttacctataccacccactgggagaaaagtttgctaaaataaacaggaaagagagaaaagagagaagcccatgaaagaaaatgtttggcaacgtgataagaggaaaagcaagcaggaaataagaacataagtttctgattttcatgaaatgttccgagtaaagtgacacttacctatgtgtgtaaatatgcatatacatatacaaatctcaaactaaagagtgtacatatttgcattttaacctaaaatcaaatttttctaattggaaaataatataaagatattgtctccagtagaatgctgggaatattaagggttgaaagtatgaagataagtagtcataaggatgtttagagattaacctgccatgtcccacaaggctggtaaatcaatgttatcaggagaaagaaactgttaaattcacatcagcgtcttaggtcagcctaagcaaataggttatatgacatgcaacttacccttctcctctttttttctcccccatcaaaagccaatttcctattctgagaaaataattcaccttctccagtgattctgcctcagaatgtccagcaaactgaacaaggctgagctccagacattggttttgattctgggcagcagaaatttccctatgggagaagatgccagcatgacttttcctagtgtgcaatgagcagcgaccagctctgtctacctccttagggatagcccctgataggaatgctggggttgagcaagaggaagagtgagtgattagaagaaagaaggcaggaaccgagtttcttttcctcctgccttgagtgcaaggtttagttccttttctaacagctcttggcaattccattataaatcaggtgaaagaattagtctgatttttgtttgtttgtagggcctagcatgtcatagaaagccactaaattctaatcagcaatatctggacagtaagggagattgtgaacttagttttcttacaggacataggtattataattattattgtggtaaaaatttcctcctagcaggaagataatttttttgtgtgctttgggaatcacccaaaagttttccactgcaaaaaccaatggaataaggaactgatattttctaaaccttcagtaagtggctaaatctatcaggcttatctattcacccccatagtgagaattccttgcaatatgtgtttgtggcattcttatagataccacagtcagaaaaaaaggggatggattaaaataagcagaaaaatttgctacattctgtgctaactttaaccccatataaatgctgtcttataagtagatctattaaatagggccatccatagccacagcctttcatattttaagtaaatatcacaacataatattttcatcagaaaacttgtctccaatttctagagccttttgttactcctggcactatcttagtaggactttagtgtgccagatatgagcctgctagatttaagtcaaataatgatttattcttatgccctcttctcaactgtgttgatcaaattcataaaacaaatgttagccttaaattccttacttcacttccttgtcttcacttcctctgggacatagtcttgtcttgtctagtctagtcttatgctgcagccttgacaacttgccaagataaaaagttgagagttacgatagtagaaagaagagctacagagaataaacagaatgagaaagtataaaatatgattaaatggagttccagaaagaggagagaggtgaatgaggcagaaacaatatatgaagagataatggatgaacagtttttaaaaaatggatgaaagacatcaattcacaattcaagaagacaaaaacattcctgggcaatttatataaaaagaagtgtagtgtgtgtgcatgcatgcgtgcatgtgtgtgtgtgtgtgttcagagtaaaacagcagaaaatcttaaatcaagaagaaaatcttaaaaatcaaaggggagggtgaaaaagactgttttcaaagaagtaaactgacagctgacttctcaaaaataacaatggaaaccaactgagatttgaattatttttcaatgttcagagagaaaataactaacatcaaattttgtataaagcagagcaattcttaaaataagaaataaaagcatttaaagaaaatctgcagaatttaacggtatattttctctaaaggaaactccacaagtagatggaaaggatgagggcctggattatactgcacctgccacctgtgtggttgtgctcaaagaacagaacctctttgggatggtttctaaatttcaaaataaagatgaggtattctcagctagtctcactgtattttattaattgaaacaccatatgtgaaacagaagactctaatgcaaacgtaaagagatttgttactaaaaccttaggccaagctttggatgttcttaaaagggcaatggcaggaatgagaatggggaaaatgatctatcctcagtgagttgtaggacttagagaaagcctcaagggctgtcatgtgttttatcatgtcctgagaaacaggtttacaaatattagcacctccttactgtgctggataattctattcggtttcctccagcagtttgtgataccccctatgtgtagagtgggtatgtagggggcaaacaaaggactcatctgttcttgctgccggcaagctgtagccacatccagttggctctcacctcccaaatagcttcaaagagaagcaaatcatattcaacagtttttgtggcagaactcatcctgcagaatttttaaaaaacttgttttatcttatggcctttgataaaagttctgaacccagggccagttgtagcagaatatggacatatgaaaaatctgcctttagtctcttgccattccttcaccattgcctcccacctattctactgctcctgctttttacccagcccctagtagtattctatgatgttttaatactgttagcctgcccaaagcctgatatttctagtcactgaattgctcttcagaaccttctcctacactattgagtagatatatatctctctccactcaatctctaaaataaagtggtttatagcctaacttactctcaatgtaatgttctaggttaggtctccctggactgtttgtatttgaaaaagaggagattccaagaaagtctcctcaaagatacattctcagttacggtggcagtaggatagaaaagatgtttttattgtaaaatactctttcccacacttctcagccatagtgtaggctgccagtgtttggtcagttcccatcagcaggaacacaggcaacatactgttagcaattttttttttttttttttttttttgagaaggagtctcgctctgtcgccaggctggagtgcagtggtgccatctcagctcactgcaatctctgcctcctgggttcaagccattctcctgcatcagcctcctgagtagctgagattacaggcatgtgccaccacacccagctaatttttgtatttttagtagagacagggtttcaccatattggccaggatggtctcgatctctttgtcagcagtttttaaaacatatgtttttattccaattattttagaaagataacataattcagaggaaaaaattaaagattctattgcttgaaaatacatagaacaatattctatttaactacaccttgtctatgtttagatacacaaagactcaccattgttacaattacctagagtattcagtacaataacatcctgtgcaggtttgtagcccatagcctatcgtgtagcaggctataccatctagaccagtacgctcttataatgtttgcacaatggcaaaattgcctaatgatggatttctcagaacgcctgtagttgagcaaggcatgactatatcagtaaaacttctacatgaaagaataggcaggggaactagtttgtctaagaaaacatatgaaaatttaactgtttcagaggcagcacagtcaaaaaagtaaaggtttgtaatcttagatatcactcaaatactagtcctcctacttccaaaccagataaccttgggcatgtgactgaatctttctgaacttagattcatctgaaaaatgaataccatctatttcctagagtggtaaagagtcccatatgctacgggacttaggattgcttaggattgctaaggatagctttggctattcaagctcttttttggtcccatgttaattttagaattgttttttcaaattctgtaaaaatgaagttggagatatatgagataaacaatacacattacctgccacatattaactaatatatataacaaacattatgtaaatgacaaagagtactaggtactcccaggaccttttatgatcctcagaatatttttttgaggtaggtattattatcttgcttttattgatgagtaaactgattttcagagaagttaagtaacttgttcaaagtcatgcaattaagaagtggcagagatgtggtagtttttgtgatagaattcttttcctttccctgcctgttgaacggtctgcatttagacatttctttaaattattttcagtttctttcccttcgtccccacaaagagcactaaaggtcatggtaaggtaggatcatttgaatcatgttatgatcttcctaacatgaatgactcctggcttttccagttaacaggtagtggtccattatgctgtggttatattttctgcatgtatgatgatataacgtaactggccaggcacagtggctcatgcctataatcccagcacttttggaggctgaggcaggcagatcacctgaggtctggagttcaagaccagcctgaacaacatggagaaatgccatctctcctaaaaatacaaaattagctgggtgtggtggcacatgcctgtaatcccagctacttaggaggctgaggcaggagaattacttgaacccaggaggtggaggttgtgctgagccaagatcataccatttcactccagcctgggcaacaagagcaaaactctgtctcaaaaaaaaaaaaaagaaagaaagtaaccaaaagactgtcacttacttgccccatgacccctgttacatagcctttgaacctcagtttgtcatagaaaaatgaagaaaatagtctctcccatcctattgctttttactgtattaaatgtaaatgtatatggttctttaaatgttatgtattattcagatttattacaataattgttatgtaaatgacatctatctgataatagaatgaggtctggagttcaagaccagcttgaccaacacggagaaatgccatctctactaaaaatacaaaattagctgggtgtggtggtgcatgcctgtaatcccagctacttgggaggctgaggaaggagaatcacttgaacccaggaggtggaggttgtagtgagccgagattgcaccatttcactcctgcctgggcaacaagagcaaaactctgtctcaaaaaaaaaaaaaaaagaaagtaaccaaaagactgtcacttatttgccccatgacccctgttacatagcctttgaacctcagtttctcatagaaaaatgaagaatatagtatcttccatcctattgctttttactgtattaaatgttaatgtatatggttctttaaatgttatatattgtttacatttattacaataattgttatgtaaatgacatctatctgataatagacacagcatattactctattaactgcatatacagtaaaaacacagtatagaagattttaagataatctgtgtctatttttgtatcagtgacatgctgtttgggttactatagccttgtagtatagtttggagtcaggtaatgtgatggctttgttctttttgcttatgattgctttggctatttgtgctttttttgtcccatattaattttagaattgtttttttcaaattctgtaaaaatgatgctggtaatttgataggaattacattgtatctgtatattgctttgggtagtaattttaattatattgattgttccaatcagtgagcatgaaacatttttttatttgttgtatcatctatgattcctttcatcagttctttgtagttctccttgtagacatctttcatctctttggttaaatgtattttctaagtattttattatttgtatgtgtggatatcataaatggaattgagttcttgatttttttcttagcttggttgttattggtgtatagaaatgctactaatttttgtatgttgattttgtatcctgaaagtttactgaagtcatttatcaagtctaggcatctttcagaagactgtttagggttttctagatataagatcatgtcatcagtgaatagagataattttagtttctcttttttaatttggatgccttttacttctttctcttgcttgattgctctgcctaggacttctggcactatgttgaatagaagtggtgagagtggacatccttgtcttgttcctgttcttagagggaatgctttcaaattttcctcattgggtatgttgtcatggatgacccttatttgtcatagtttttttttattattttgaggtatgttcctttgatgcctagtttgttgagggtttctatcataaaaggatgttgggttttattgaatgctttttctgcatctattgagatgatcacatggtctttgtttttaattctgtttacatggtgaatcacatttattgatttgcatattttgaacgtagaccaatggaacaaaatagagaacccagaaataaaaccatatacctacaaccaactgatctttgacaaagtcaacaaaaatacacaatgaggaaaggacatccaattcaataaatggtgctggaaaaactggatagccatatacagaagaataaaactgaatgcatatctctcaccatattcaaaaattaagtccagataaaataaagacttacatggaagacctgaaactacaaaaatcctggaagaaaaactaggaaaaactcttctagacattgaactaggcaaaaaaatttatgacaagatctcaaaagcaaatgcaacagaagcaaaaatagacaagcagtacttaattaaactaaatagcttctatacggcaaaagaaataatcaacagcgtaaatagacaacctacaggatgagagaaaatgttttcaaactatcaaccaacaaaggactaatatcctgaatctataaaaaaactcagacaactcaacaagaaaaaaacaaccccattaaaaaatgggcaagggacatgaacagatatttctcataagaagacatacaagcaaccagcaaacatgtgagaaaatgctcaacatcactaatcatcagagaaatgtacatcaaaaccacaatgagataccttctcacatcagtaaaaatggctattattaaaaagtcaaaacacaaacagatgttggcaagaatataggaaaaaaaagaatgcttatacactcttggtgggaatgtaaattagtacatctatggaaaacaatatggagatttctcaagggattacaaatagtactactattcgacccagcaacaccactgctacccaaaggactacaaatagagctaccattcaacccagcaacagcactactacccaaaggaaacaaaattgttatgtcagaaagacacctgctcttgtgtatttatcacagcactatttacaatagtaaagtcatgaaatcaacctaagtgtccatcaatgtattattgtataaagaaaatgtggtatatatacaccgtggactactacacagccataaaaaagaataaaaccatatcttttgcagcaacatggatttagcttgaggccattatcctaagtggaatcactcagaaacagaaaataacgtactgcatggtctcacttataactgggagctaaacaatgggcactcatgggcatatagagggaaataatagacagtggagattccaaaagggggaatgatgggagggttgaaaaattacctattcagtacaatgttcaccattcgggtgatgggtacactagaagcccagacctcaccattatgcaatatatccatataacaaacctgcacacaaatgacctgcatcgtagtaacagtaataataaatatcaaaattatatgcttgtctagggcacttacaatgaatggggcttgcaggactggaaggtgctctgtgtaattcagcaagtgagtaagaggtcagtgaatgtaaaagcctaggacaatattatacactgctgtagactttataaacactatatacttaggctacagtaaatttgtttaacaataatttcattttctcaagaataagttaaccttaccttactgtagctttttttactttataaacttttaatttttttaactttttgtctctttcataatagcttgaaacacaaacacattgtatagctatacaaaacaattttcttttttatatccttatttatatccttttttatatccttattcttttttaatttttttttctattatttaaacttctgtactaaaaactaagacacaaacacacatattagcctaggcctacacagagtcaggatcatcagtattgatgtcttccacctgcacatcttgtcccactggaaggtcttcaggggcaataacatgcatcagctgtcatcttctatgatagcaatgtctttttctggaatacctcctgaaggacctacctgaggctgttttacagttcagttctttataagtagaaggaatatactctaaaataactattaaaagtatagtatggtaaacacacaaacaggtattaccgtttattactatcatcaagtactatgaactgcacataattgtatgtactatacttttatatgattagcagtgcagtaggtttgtttacaccaacaacaccacaaacatgtgagtaatgcatttgtgctacgattttacaatggctataatgtcactaggtgatagcaatttttcagctccattataatattatgggagcactgtcataaattgttgatggaaataccattatatggtgcgtgactgtataataaaacctgttccagtttgaaccattggccagagacaccaacagacacaatgtaatcaagatgtagaccccaatgtcagccttctagacacaaatgaaacaacacccaacttagctcaagaacactttctaaaagcaggaggctccagttccccaatctgtgggaacaaggagaaccacagtaagtgaagaggaaaatcattatctctgaacttgtcagaagaaaaatcccatcaaggaatgcttttgagaacttgaattctagggaagcccactggaggccacagccactacagaaatatagaggccacagcttcctgacatgcggtgaggccacatctccactcacttcctgtcagtaggtgtcacttgaacaaattttctcatgtcctggccagtcacctggagcctggaggcatgtcttactttgcatacacctctgtcaaaatgcgtatcagacaattatgttataaattgaatgtcttaggtgttacagagtaggtgttgtggaatgaatatttgtgtatcctccaaagcgcactctctctttctctcacacacacacacatacataccccaaggaaaggccatgtgatatctcgattttaaacttccagcctccagaactgtgagataacaaatttctcttcgttaagccactcagtgagtggtatattgttatggcagcccaagtagactaatacattaggttattctgctactgacccaccttactgagctagacctactttggtccccacatgtctccccagggacactgtacgaagcctggagctatgtcagtttttctgtactcaaaagtagtgccctcctatatttacctcttgtttgttttattggagttcctggcaggtatctcccttctctttgaactgtaaatagaaataatccttctttttgaagtaggattttctttctgaacaagcttataatttcctaccattgatcttcttgcatggcaatttcaattaaaaaatcatttgaataattatgttagaatacacagcaactatatttcttaggttagtgtagtttgcaaacaaaaggcatatatgttttcctagtaaccgcaatgtgtgtgtgtgtgtgtgtgtgtgtgtgtgtgtgtgtgtgttttaatttccctacaaatcactgctaacagccaaggaaagcgaggctatattctggaaggcctgggagatatagtcccctgtatgtgtatgaaatctgtttggaatctcatgtactatatttaaaattcatttgttactttctattatgtaatatattctcatttgtttcaacatacaaaaaatactttaaatcgattatttaaatgtatgtcatgttcatcccagagcttaatgtcacccttcatacattcatacactactacttggcttattcttcttgaggagagagaaatgtattgccagtattctcaataggtacactttcaaggctgagacagcagggctcatgaagaactggaacaatataaaccattgccgagactgcaacagcaaccatgatgatctcaaggaggcgacagatctaatggtaatgggaaaacacacccttgaggaatcagtgagcccctgcagctccctgtcatctctgtgcctcccacattccattaagagaatatagaaggaatgcatttttcatctgaattaaggtgttttgctttctgtttattgtttctttattttccaaaaatatgtttttcaataaaatctggcagtgattaaaaagaaaaaaagcaacataagattgtatttttatttggtggaaagcagcaattcattttaggtaacatgccaccacataacaggaatagagaaggtaagaaaggtaaatatacatacagaagtaagtcatgggcaaacctaaacaactaagaaaaaattagcaatgaaattaaaaggagaaaaatgcccagggaggcagaaatagattttcctgctctcctacgtctaaagagcacaatgagatacaaaacacaaatgccagtagatggcagaagctatttacctaaatcaggattgaggctatgaggcatagcttagacactcagtccagatcctaggcatttgaaactccaagttgcagaatcaattttgatcttaaaaaccaaacttcttcaaaattcccttctgtaaaagtgaggtttgctactattcaaagttttatttgcttcttaaagaatagccagaatgttcctaccactgtgttgataagcaaaggtaacattgcctctatcaggggctttttctcttttatttaagtctctgccttttatgtcaagggattcttttaatgtctaatgatcctgggatgctcattcatacttagtaggatacaaatctgagattcaagcaaagaaaaatggctccagttcctgtttttaaatacttcttcacttcactctcaactaagcctgatagcccagaatttcatgttatttattcaatatcttcagaaaaatagtcttttttccacaaaagtggttggaaaggagtggacacctgactattccaggtcaaatgggaaatctgagagtataactgcaatttattcaattttactttgcattttctctataaagtctcctacccctaccctctctctgattttctgaggtaccaggtatcctactcactaagacttctggtgcacctgaatttttgttggcatttgcttctgtgggaccttagaatttgcctttcttcagttcatttaagtcagttaccacttgttcattcacctgcattttccaaaacatctcacatgctgttatcctttgcctgttctatgtgtcctttggggttcataacttttaaaaacatttttactctcatttcaccaggtactcagaaaggaatagagaagtatgtttccaattcaccatacttaattatcagtctagccttcactgatatttcagagcaattataaggtgcccaggggcagagtttccatctgtcttgttcatgtctccatatttctctaatatatagtgaatactcattaagtgtgttcatcaagtgaaacggagaaatagaagaaactgaaaaagtggcatgaaaggacaaaaatttagcatttcaccatatgggggcagtgtctctattcatagctaaccttcaaggttagctcaaaaccctgggaaaacatctggtaagagatccgattggctgatatctggaacagagatttaaatttcgtggtagtgtttttagtgtcactctaagcccaagagagtttcttgaagcaaaaaaaaaaaaaaaaaaaaaacccattcaggaaataattctttgctgataaggatgctccttgaacatttattaataatcttgtggatgcagctgacatgtgagtcttgagagtttctgactcttccatagcgaattctaaagggaaggaaattctgtgagggcaggaggtgaggctttatcagagactatgaaaagaggaaaacagaaggaaaaaagctagagaaggagggaggaaaggaaagacacagatgcaaggctgggaagtttggtgatatagtgtccaacacagctctgaaaaaggtgatctaaagataaccttaaccaccttcttttctctttctaaacaggggtcagtggtcaacagctgaatcagagtcctcaatctatgtttacccaggaaggagaagatgtctccatgaactgcacttcttcaagcatatttaacacctgactatggtacaagcaggaccctggggaaggtcctgtcctcttgatagccttatataaggctggtgaattgacctcaaatggaagactgactgctcagtttggtataaccagaaaggacagcttcctgaatatctcagcatccatacctagtgatgtaggcatctacttctgtgctgggcagcacagtgctccccaaacacctgcagcctgtactcaaacttgcagctggaactctagtctctatgctgccttcagctcttagtcctcttggcatgaaatgtgattatgcatgccacctttgccactgccattctgtcaccacaaactctcctttatccaaggatttgtcctccaaagattgtgctctttgcttgatgaacttgcccctctcaattcatttttagtgtatgtaatagattttcttagttatttctgccacgatatgaggagaattgatcaacacacagttacagtagaagattttaataagtatctcttttaaaatggatgatatcaataaagtaaaaatgagagtccagaaataaatccataaatctatagccaatttattccaacaagatcattcaatgggaaaagaatagtcttttcgacaagtggtgctgggaccactggatagccacagttggatctctacttcacatatgtacaaaagttaactcaaatggattaaagacctaaatgtaagatctagaagtacaaacacttagatgaaaacatagttgtaaatcttggccaccttggactatgcaacaatctcttatatacaacatcaaaaaaagcaactgaaggaaaaatagataaattgggcattatcagaatttaaatctttgtgcatcaaaattcgcaaaatattccacaaaggaaaatgaaaagataacccacataatagaagaatatatttgcaagtcatgtttatctgataaggatctaatatcaagaatatatattttaaactcttacaatttaacactaagacaaatgccaattttaaaacggtcaaatgatttaaaccatcattgctccaaagaagacacacaaatggccaaaaagcatgaaaaaaaagatgctcaacattattattcattgggaaaatgcaaattaaaccacaatgagctgccacatcacacccactaggatgttcataatttttcaaaaaggaagaataagaaagagaaatgtaaaattctaagtgttggtaaggacgtggggaaattggaatcctcatccaccactggtaggaatgtaaaatagtacagacacattagaaaatagtttggcaatttctcaaatgactaaacacagagttaccatttgacccagcaataatagtcctaaatatctacttaagaggtcgaacatgtgatttatttcattggccagaaccacatcatatggccagtactaattgcaagggaggtagagaaagggagcatttaatttgtctagcctctaaaaaagacatgagcatgaaagatgtcaattgcagataaaagtgttggtttaactatccaaaaacatctgccacatcatactaggtcctcattccccagaagagactctgatgatacatcttgatattcttattactgttattaccctaacagcatgtgccaaaggaagctgaagtctgttaagagctctacagagctcttcaaatgtagtattgtttttgctccaaaaaatatactgtaggttttcttccttgcaactgtcctgtgggaaatcaatatctctcaagaggcatcagctgatgtttcagaggaatgatggtccactgcccctgatactgatatgcgcagttccaggcagttcttaaagctagtcgctttaacgcctcacagagatcatcatgttcttaaacatcgatacggaattcacttccatctccctgagaagcagtcccctgaagacccagcacaatatttccgtgggtcccacatgtgcatatgacataaccctcaaaatcctagggatgttttaattgaggtaatacttttacagctatttataggatctctagcacaattcttttctcaggaacttaaaaaatgggtattagctaaccatgagtaaccatgtttccttctcccttccccattcccattcagctgtatgtaggcaaatctaccatcccaactttctcgatgttgaagctatgatttattttatagcaggctttctattttattttatttttaaacttttattttaggttcaggaatacatatgcaagtttgttatgtaggtaacctgcatgccacgggggtttggtgtatggattatttcatcacccaggtaataagcatagtacctgacatgtttttcaatactcaccttcctcccacccttcatcctcaagaaagcctgggtgtctgttgttcccttcttcgtgtccatgtgtactcaatgtttagctcccgcatagaagtgagaacatgtgatatttggttttctttcccgtgttaatttgtttagaataatggccttcagctccatccatgttgctgcaaaggatgtgatctcattctttcttatggctgtgtagcattccatggtgtatatgtatcacattttctttatccagtctaccattgttgggcatttaggttgactccatgtcttcgttagtgtgaatagtgctgtgatgaacataggtgtgcatatgtctttatggtagaaaaatttatattcctttaggtatatacccaacaatgagattgctgggtcaaataataattctatagaaggctttttaaagtgtgggctagtattgaaggtaaagattgccttattcagttctgtatgctcctctgttcctggcacaaagaagacagtcaattaaaaatgtttacatgagaggccgggcacagtggctcatgcctgtaatcccagcactttgggaggccgaggcgggcagatcacaaggtcaggagttcaagaccatcctggccaacatggtgaaaccccgtctctactaaaaatataaaaaaaaaattagctgggcgtgatgatgcgcacctatagtcccagctacttgggagactgaggcaggagaatcacttgaatccaggaggcagaggttgcagtgagccgagatcacaccactgcactccagcctggtgacagagcaagactctgtctcaaaaaaaaaaaaaagttacatcaattaaggggcaagatgctaattaattctcatatctgtgcctctgtgccacccagaaatgcagaaggaagcttataaacaaaaaacagtgggttaaattatctgaccttcatggggacagtacaaactatattcataagcagtaatagaacatggcattatttactttattgtggtgttgtcacatcatcagtctcttacttcatgtttctgggttttgtttcttgcttaagatctagagaattaggccactttatcattgtcacaaaaaaagtagtcttggaaaccaagcgatccatcacttcctctcaactgggcaattcagcttttctggaatgcaaatatgtttgtcttcaccttgagatttgaactttctaattagtaattctttttcttagtgatcataaagatcaagcaagaaagtactagtcttcctagacttgaacactacctacatagattatatgtattttactaaaaatagacattcctagacgatgacaagaaaactatgtaataacatttatggaatggaatgcaaccaaagctatactccaagtatactagcgaaggccaaactattctaacaaatatatgccaaacgttcagaggcttaatgaacaaagtttgtctttcttgtgaaaatctggagcagatattccaggtcagcagatgactctgccttacatgatctttgaggaactgaggttattctcatttggggactctgctatttctcagagacttaccatcatatgcagggtcatggcctggctatgccaggtttcacttagcaaggagatgaacgagtgggtatggagcaggcatgaccattcccttaagaatcatggacaagaaataatagaattactgactcctaagattatggacagctttgggtagcctgtccttcaatggtaagacaattttagaagtatctaccatctttcataaaacatgtggacactagttttcagctattctgcaccagctcacaagatggcggtgttctattttgaatgacttccatgggtgattgagtgggagggatttgaatttaaatagaaccaaatgacactttttttaatggttggctgaattgccaaattgctatttccctttttctgagtgtgtgtctgtgtccgtgtgtgtgcatgtgtgtgtgcacgcacgcgcacacaggcagacgctaggggtagagtgtgatggttcaaaaagaaaaggaaacgcttaaaggtagtgaatcacgttttgcccaggaaaacacacttgataactgaaggatgatgaagtgtccacaggctttactagctatcttttggcttctactgagctgtaagtagggttactacaaagggtcaggggcaaccaggaaacctgaggattgatcctcagaacactaaaagggtaaagtagacttcgttctgacttattgtctgggagccctgtggttccaacggtgaataattatcacatttttctacacaggggtgagcagtgaagacaaggtggtacaaagccctctatctctggttgtccacgagggagacaccgtaactctcaattgcagttatgaagtgactaactttcgaagcctactatggtacaagcaggaaaagaaagctcccacatttctatttatgctaacttcaagtggaattgaaaagaagtcaggaagactaagtagcatattagataagaaagaacttttcagcatcctgaacatcacagccacccagaccggagactcggccatctacctctgtgctgtggaggcacagtgctccctagtcacctgcagcctgtactcaaattctacagctgaggctctgcaactgtaagatggggaacttgctacattgagcaagccctcaaaaataaactatacggaaaagcagttattggtcaaaatccttgtgcctatgttgacaattacttttgcagtttactgaatcctaactcagagtcatatcgctgcattcactactttctctgtgagttttctatgggattcagcatagctaatatttctagagggtcactcaggatactaactccattgccacaccattatgctctgtggtagaaagcaagcccttttatcaggattgtacaggcaactgatatgtgcactacacattagggaatctacctaacagctatggatgttttagcttctttcccaggacaggcacatttataggtaaagttctgcctataacatttttttctggacctactagcaaagaacaaagggtaggaacaagcaggtatcattacctgattaaaacaaaaggttttcattctcagttgcattattcttacttactatcttcattttaggattgttgcctatgctaggtacttcattaaagtggtgatagaatttttcaagatattacacattaatttgtgtacttagaaccttaagcagcctacgaaaagaaaggagttagttgaagtaagttatgtgaagctaacataaacttagcctacttatgttgtgatacactctttcaatgaattatgtaatcatatgtatggtatttacaaagagcttgcaatggaagctaccatttattgaaagcaagtattatgtaccttgtattttgcaaatatcatctcattgaattctcaaaatcactttgataaatcatcaatattactttctgttaacatattaggaaatgcagactcagaaagattaagcccccttccccacctcctaccccagacaaataactataacagaatctgaaatcaggtctatgactccaaactatactttgtctattacatgccctgatgttaaacatcactgaggagaaaatttacccacagtgtgaccacaattatgtgtaaaaaatgtacacaaaatacgaaaataatgtgttcaacatgtaaataaaataacatttgcaataatatgtgaataaaataactccaaaagtttgcaacagtattagttatctttgaatactgaacttaatactgttcattgttttactcctttataatattctttatttttcagattatctactatgaactcaatactattattatttcagaaagaaaaatatacattttaaaataccaaaatccaagtaggctgaactgcattatatgataattatctgacactcacagtagcttaattacaatgaggaatagacatgactatacatagccaaatgatacagcattaaaacaagatttttgattgctagctcttcaaatcactgtagactagtgctctcttcaattgggaatgttttaaaattacaagaagacctatttctcctgagaatttatttgaatgactgtcctatgggtagaatgctttaatatcccatctctgtgtaggagaggacaggcagtaaaggccacccgtgcttgtgagttcattagacaattcattgcaaattgggcatggtttaggtttcactgtctgggaaatggggagatagcctgagaaaagggcaggtaaacattcaaagaggaggggaagaaacagtataaaaattaatagaatgtatcctgccatttttagcctgcacagtcttctgtccattttcctttctcctttctatctgcatcaaaacccagaaatcacacagtggatataagaggaaactctgacagtcatttatttaagactgaaaaatagagcgggaaaccctatgcaagatgcccagtgtgtctggctctgcggtgtgaagagtttatgatttagaagccagagatttagctgtctttgatgggaatgtgcagttggaagggggaagtttcttttttcactctttattgtttcctatcctaatgagaaccaaacaatttacatctcaaaagatcaacctgtcaccaaaataacatgtattttaatgctaagactaaatatccatttgttataaaagaaaaaacaaattaaaaaaaatttataacctcaacctacagacattaccactattaactatttagcattttgctttccatttcacctgtatcaatgaacatgaaaaaataagtctgtagagatgtggggaattcaacttatttcaaacaaagagtgtttctcaaagtcactgcaaaaataggtgtttctgttccttaaaaaaatctacatggttaagatcctcccacttttgacctgtgagttgtgataaaaagcttccagaaaactcatctcagtgacttgattatgaaatgctaccagtttgaagcagtcactgaaaaacataaggtcataaatcaggaatccagaagaaacaatgaatagcaactttatcttcacttcacttctaacactggctctccaaggtaacagccctatcctgtacccagagtggcccttctggagaaggtggctggtttgacctatgactgttgagtgttttacattacagggtctgggagagcagactggatcaagccccaggagacagaagtatctggaacagaagggaagactgtgaacctactttgtaactatggtacatcatcggggagctatcttgatctctgctggttttgacagtatccgagccaggcatcagaatacattctctacagagggtggggatattctggaaaaggagatgccagttttgccataggaaagtttattcaaagagtacagcaaatgcaataaatgtgtacattagaaatctggttcctgcagacactgccttatattactgtgtgctgagatgcacaaaaagaacactttctaggggtgtcatacaaaaacaccagcgcacaggaggaaggagagcatttgttataaccacactgatttttttttttttttttttttgcaaaggcgtcattgtaagtggaagacactggatcaggagaattctgctttaataatagctatatatagtaatttgtaggcaaatagcttgagcttttagagtttccatttcctgaaattagatagcaattctaatttgtaagcttttatgagacatggttttaacacttggattaagtgcctagcatgtcctacatgctcagcaaatggcaaatatcttttcttgctctccctctctgtctaactactttgacctcaaaggacccttctttcactatctgagaatcttctatatactcctactggtaaaataataacaacaataacaataataataataataaccctaaaaacatacatgcaagacctagatagagaaggcttctttgcccagggatcaatggtcattgtgccaggattttaaaagtgtatgctcagcaaatccaacaatcagaggacaaaaggaccccgagacactagctcctgagttcatagaccagggcagttgggcatttatcgtgatctgaacaagaacaggagagagttcctcacaagactaaagagaagagaaagacatttagcattaggtgggtggtgggagagaagagagaaattcttgggaagactacagccatgttctggtgtcagatctgacctccctagatggagaagagaggccaagtgaggcagtgggtcctcagcccacctggtagaggaagagggcacctgccacttcctgcactggttcaaactacactcctaacagaatcctatcatttaatctggatgtgagcaaagcctagcatctttgtttggactggtgatagatgaaaggtaaaagaggaaggaagatttaatttagagccttattcaatagtctgcagcagcactagcaccttactgcttgcaggccggaaacctcaaggtctagcagttcacagtgaagcctgcaccacactggctgctgagtaactgccccagtcactaggagggcttggaaatcagacagcaaatgacaccttaaaaaatatgtataaggccattcttgcactgttataaagaaatacctgagactgtgtaatttataaagaaaagaggtttaattggctcatggttctgcaggttttacaggaagcatggtgctggcatctggttggcttctcagaaggccccaggaagcttataatcatggtggaaggcaaagggggagcaggcatgtcacatggccagagcaggagcaaatgagagagagtgagggggaagatgcaacacactttatttaaaccagatcttgtgagaactcactcactaaagcaaagacagcaccaagccataagggatcccacctccatgatacaaacacctccccccaggccccacctctagcactgaggaatacaattcaacatgatttggatggggacaaatatccaaactatatcattccactcttgatccctcctaagtctcatctccttctcacattgcaaaacacaatcataccttcccaatagtcctccaaagttttaacaaattccagaattaactcaaaagtcccaagtctcatctgagacaagtcaagcttttccaccaatgagtctgtaaagtcaaaaacaagttatttactcccaagatataatgtgagtatacacattgggtcaacattcccatttcgaaagggagaaattggccaaaagaaggggccacaggtctcatacaagttcaaaacccagcaaggcagccattaaatcttaaagctccaagataatctccttagactccatgtctcacatccaggacacactggttcaagaggtgggctcccaaggcgttgggcaactccacctctgtggctttgcagggtgccacccccacagcttctctcataggttgttgagtgtctggcttttccagacacagggtgcaagctgccagtggatgtactattctgggatctggaagatggtgacccctttcccacagctctactaggcagtgcttcagtgaggattctgtgtggggcctccaactcctatttcccctccacactgccctagtagaggttatttgtgggggctctccccatgcagcagtcttctgccttggcacccaggctttctcatacatcctttgaatctaggtggaggctgccaagcctctttcactcttacattgtgtgtgcctgcaggcttaacaccacatggaagctgcccagagttatggcttgcaccctccaaagtggcagcctgagatgtacctgggcccctttgggtcatagccagagtggccaggatgtggggagcagtgtcttgaggctgtgcagggcagcagagtcctggacctggcccctgaaaccattctctcctcctaggcctcaaggcctgtgatgggaggggctgctgcaaacatctctgaaatgcctttgaagccttttccccattgtcttggctatctggctgtcttttagttatgcaaatatctctggcaagcagttgctttgaggcttgcttgaattcctttcctgaaaaatctttttctttctctcccacatggctaggctacaaattttccaaacttttacactctgctttttaaaatacaagttctagctttaagccatttctttgctactgcatctgagcataggttattagaagcagccaggtcacctcttgaatgcttcactgcttagaaattgcttccaccagatatactaaattatcactctgaagttcaaacttccacaaatccctagggcaggggcacaatgcagccaagtttgttgctaaggaatagcatgggtgacattcgctccaattgccaataagttcctcatttccatctgaaatttcatcagcctggccttcattgcccatatcactatcagcattttggtcacaatcatttaaccagtctctaagaggttccaaattttcgctcatcttcctgtcttctgagccctccaaatttctcagacctctgcctgttacctggttccaaagctgcttccacattttcaggtatctttatagtaatgccccacttctcagtaccaatttgctttattaggcctttcatgcaccactataaagaaatacctgaaacttggtaatttatttaaaaaaaaggtttaattggcttatggctcttcaggctttacaggaagcatggtgctggcatctggggaggcctaaggaagctttcaatcatgacagaaggcaaaaggggagcaggcatgtcacatggccagaacagacacaagacagagagagtgagggggaggagccacacacttttaaatgactagatcttgtgagaactcactcactattgcaaagacagcaccaagtcatgagggatctgccctcatgatccacatatttccccccaggccccacctccaccattggggattataattcaacataagatgtgggttgggacaaatatgcaaataatatcacaataatttcttttataaaaaagtgaaaaatacttttattagagaataattttcaaagatctgtttaaaactaacttttaaaaacaatgaactatgggaaacattcactaatgcataaaataaaatatgtaatctttttcattttcagtttgtgcaaagttattttcacaccctgctggtagcaacacaatatattggtacaatcttttacacagtgaattacttggaaagggattttgagattcattaaacagttcatgcctttgaactgtttgaaactgaatgaacacctttgatccatttctcagaatttatattaaagattgattttaagtagaaaaaaccctctaggcaagaaaatagtaaaaatttctcaaccagttagaggaatttggatggcaacttgactgaatactttacaactatttaatgagttaataatactaaaaacatagtaatgctcttgacatacagttagagaaaacatagagttcctataataaccatatgctcacactaatatcgaatgaatgaagcacatagataaaaactggaagttttgatgcaaaactgaaagtatgaaattatttagtgtatgtacttgcaatattttaatttttatttttttcatggaataactgtgaacttgtgcctacaataaataacattttaaaaattctcttgactccaaatgttgtagctagtggaaaaacaaacaaacaaggatctcaaccccagctctgtgcctcagctgtttctcctttcttcaactctggggcatcaattttctggttcccttcccttaactaagtcctcttcttcattattccccaagacctgctgacagaaactctgctgaaatattatttgtgtctcaaacctatctttgatatgggcaaataaggaaaaaactattttcagttcttttctattttctctgcagtagactcagtagctagaagattgagctgattgtaccaaaaattaagaattcttcattgacatcacatgggaaaaccatctctggttttccaagaaggaagattaggtaaggctatataccttgtcattttttttaagttggaacattaaagataaagcttaagtcctctctgctcatgttttcatctgttctcttttcccagagctaaatgttgctctgggtttgtgaaaggaaattaaatcttgggaccccaaactcattgagccaaagggaaaagttaagctgcgaactgggccatgcaaacctgccttgccctttcagttcctacataagatggctacaagatgaaaagctacatgactccaccatattttgcccacaaggaaattcctagtgagctgcaagatctttaccctatagtgtctctgttaaaatttcaccttggaaggccgggtgcggtggctcatgcctgtaatcccagcactttgggaggccgaggtgggtggatcacgaggtcaggagactgagaccatcctggctaacgtggtgaaaccccatctctactggaaatacaaaaaattagccaggcatgtggcgggcgcctgtagtcccagctactcgggggctgaggcaggagaatggtgtgaacctgggaggcggagcttgcagtgagccaagatcgtgccactgcactccagcctgggcaacagagtgagactctatctcaaaaaaaacaaaaaacaaaaaaaaatttcgccttggcaatgtaaactgatagcttattatctttacaggtgcagtcaacccctgtccaccagacataaatacacatctgattgttcccctgccccattttgcctatgttatcttgtgtaaaaatgcaaattccctgcatttttcctctgccccatttatctatgtcatcttatacaaaaaaaaaaaagcagattcactaagccagacaaaggcatgaataactatttttccctacccttctcttacctaaaaattgtatacttctcaatatcccaccctttcccctttaaatctggagccctcaaaatcatcttcggagaaagtcatagacctgtctcctgggcacacatccttaactttggcaaacaaacctaaaatgattgagacttgtctcaccatttttctcaattgacacgtttataatttacattttaaattctttatctttattaatacgcacatataaatgtacatactcatgggaaatataaactatgattttatggcattttttaactaaatgttacatatgatatgtttttctccacaatttcctttcattttactcaacaaaatagacttgaagactagccaggttgatagagatcatctcatttccttttaattcatgtaaagtaaatcattctatcaatatgctatatttaataatactgatagtaataatattatttctccacaaagtagacaactaaggttcagaaagattaatttgccaaggtcacataattagtaagtggcagaatgaaagacaaatcaaatcttctgactttagaaagttcttctgtctttctcatttccaacatgtttagtggcaagagaaaggttttcttcacagaaacctaatatcccaagcaaatttgtatgtaggatttctcttgaaaattacctctcacttggctctgttcttatggctattaggcaataaatactaataataaaaataaaaataacaaaaacccctctctcccatattttggaaatttttcaatgcaacacaatggtcaatgttgttcattttttccctcatttctttgtctccaaccaaagaagcatatctctattttaattactcaacagtggggaatcaaactgattgggatataaacctaggcatttgagctggcaatggctaccctctttgggtcccctccctttgtatgggtgctctgttttcactctatttcactctattaaatcttgcaactgcactcttctggtccatgcttgttatggcttgagctgagctttcgctcaccatccaccactgctgtttgccaccatcgcagacctgctgctgacttccatccctccagatctggcagggtgtctgctgtgctcctgatccagcaaggcgcccattgccactcccaattgggctaaaggcttgccattgttcctgcacagctaagtgtctgggttcatcctaatcgagctgaagagtagtcactgggttccacagttctcttccatgacccatggcttctaatagagctataacactcaccgcatggcccaagattccattccttggaatctgtgagaccaagaaccccaggtcagagaacacgaggcttgccaccatcttggaagtggcctgccgccactttggaagtggcccaccacaatcttgggagctctagaagcaaggacccccggtaacattttggtgaccatgaagggacctccaaagtagtggtaatattggaccactttcactcactattctgtcctatccttccttagaattggaggaaaatactgggcacctgtctgccagttaaaaatggttagcgtggccaccggacttaagattcaggtgtgaggctatctggggaagagctttctaacaacccccaacccttctgggttggggacgttggtctgcctggagccagctcccactttcaactttcttggggaagtggaggactgactagaggcagaaagctctcatccagaactcccagcagtagccggttgagaccatggcgcagccagaagtctctagtcaacagtcgcccatacctcctgggtcccgaccacaactttcttgaaagtgtagccccaaaattctccttacctctgaatctacttcctctgatccctgcctcctaggtactaatggttcagactttcatttcctctagcaagttgtatctccaaagggatctaaggaagctctacactgtgtccttaggcacttaggctataacccagggagtcttatccctggtgtccctcccaatttaggtatacggctctcaacatgggctgttatgtgggacacattccccaccacccttgtcagggccccaagtttgtaatggctaagagagagagacagagagaagacagagagagagagagatggagagagagagagacaaagatggagagagagacaaagagggagtcaaagagaaaaagatagaaatagaaaaagaaaagtgtgccctgttcctttaaaagccagggtaaatttaaaacctgtaattgataattgaaggtcttgtccatgaccctataacactccaatacttttttatttacactttgttgtcagtgtaaataagggcttagcccgaaagcactgaggccactgacaacctgtagctttcctatcaaaaatccttaacccagtaacccacggatgggccaaatgcattcagtcagtaccggcaactgctttgctaaaagcagaaaagtaacttttagaggaaacctcattgtgagcacacctcaccagttcagaattattctaagtcaaaaaagcaaaaaggtagcttactaactcaaaaatcttaaagtatggggctattctgttagaaaagggtaatgtaactccaacctctgataattcccttaacctagcagatttcctaacaggggatttaaatcttaattaccatacaaaggtccgaccagacctaggaagaactcccttcaggacaggatgatagatggttcctcccaagtgactgaggaaaaaaccacaatgggtattcagtaattgataaggagactcttgcggaagcagagttagaaaaattgcccaatagttggtctcctcaaatgtgcgagctgtttgcactcagccaagccttaaagtaattacagaatcaaaagactatctcaatcctgactcaaaaggttacctacaccctctctgaaatgaatttgcataagaactgttgtttatgggaatgcatcttgatggggcagctgggttgttatgaaatactcaggaaactagcccagatctaggactcacccctgagagcaaaggcaatgttgggcatgctggtaaaggaccgctagaatccagcagccaggaccactttctttgtggtcaagaaaggtgggaaaacaggtgcaggactgctacactggtaagcataactaatccgataagcagaggtccatgggtggttacgcaccctggaaaggaataagcattaggactatagaggacactctaggactaatgctcatcggaaaatgactaggggtactggcatccctatgttcttttttcagatgggaaatgttccccccaaggcagaaatgcccctaagatgtattctggagaaatgggaccaatctgaccatcagacactaagaaagaaatgacttatattcttctgcagtaccacctggccacgatatcttcttcaaggggcagaaacctggcctcctgagggaagtataaattataacaccatcttacagctagacctcttttgtagaaaagaaggcaaatggagtgaagtgccatatgtacaaactttcttttcattaagagataactcccaattatgtaaaaagtgtgatttatgccctacaggaagccctcagagtctacctccctaccccagcaagaccccaactccttctccaactaataaggaccccccttcaacccaaatggtccaaaaggagatagacaaaggggtaaacaatgaaccaaagagtgccaatattacacgattatactcgctccaagcagtgggaggagaatttggcccagccagcgtgcatgtacctttttctctctcagatttaaagcaaattaaaatagacctaggtaaattctcagataaccctgatggctatattgatgttttactagggttaggacaatcctttgatctgacatggagagatataatgttactgctaaatcagacactaaccccaaatgaaaaaagtgctgccataacagcagcctgagagtttggcgaactctggtatctcagtcaggtcaatgataggatgacaacagatgaaagagaatgattccccacaggccagcaggcagttcccagtgtagaccctcattaggacacagaatcagaacttggagattggtgccacagacatttgctaacttgcgtgctagaaggactaaggaaaactaggaagaagcccatgaattattcaatgatgtcccctataacacagggaaaggaagaaaatcctactgcctttctggagagactaagggaaggattgaggaagcatacctccctgtcacctgactctattaaaggccaactaatcttaaaggataagtttatcactcagtcagctgcagacattaagaaaaaacttcaaaagtatgccttaggcccagagcaaaacttagaaaccctactgaacttggcaacctcagttttttataatagagatcaggaagagcaggggaatgggacaaatgggataaaaaaaaaaaaaaggtgactgctttagtcgtggccctcaggcaaatggactttggaggctccagaaaagggaaaagctgagcaaattgaatgcctaacagggcttgcttctagtgtggtctacaaggacactttaaaaaagattgtccaagtagaaacaagctgcccccttgtccatgccccttatgtcaagggaatcactggaaggccaactgccccaggagatgaaggtcctctgagtcagaagccactaaccagataatccagcagcaggactgaggatgcccagggcaagcgccagcccatgccatcaccctcacagagccctgggtatgcttgaccattgagggccaggaggttcactgtctcttggacactggtgtggccttctcagtcttactctcctgtcctggacaactgtccttcagatctgtcactatccgaggggtcctaggacagccagtcactagatacttctcccagccactgagttgtgactggggaactttactcttttcacatgcttttctaattatgcgtgaaagccccactcccttgttagggagagacattctagcaaaagcatgggccattatacacctgaacatagcagaaggaacacccatttgttgtcccctgcttgagaaaggaattaatcctgaagtctaagcaacagaaggacaatatagacgagcaaagaatgcccatcctgttcaagttaaactaaaggattccgcctcctttccctaccaaaggcagtacccccttagacccaaggcccaacaaggactccaaaaaactgttaaggacctaaaagcccaaggcctagtaaaaccatgcagtagcccctgcagtactccaactgtaggagtacagaaacccaacggacagtggaggttagtgcaaaatctcaggattatcaatgagactgttgttcctctatacccagctgaacctaacccttatactctgctttcccaaataccagaggaagcagagtggtatatagtcctggaccttaaggatgccttcttctgcatccctgtacatcctgattcccaattcctgtttgcctttgaagatccttcaaactcaacgtctcaactcacctggactgttttacgccaagggttcagggatagcccccatctatttggccaggcattagcccaagatttgagccaattctcatacctggacactcttgtcctttggtatgtggatgatttacttttagccacctgttcagaaaccttgtgccatcaagccacccaagtgctcttaaatttcctcaccacctgtggctacaaggtttccaaaccaaaggctcagctctgctcacagcaggttaaatacttagggctaaaattatccaaaggcttgagggccctcagtgaggaacacatccagcctatactggcttatcctcttcccaaaaccctaaagcaactaagagggttccttggcataacaggtttctaccgaatgtggattcccaggtacagcaaaataggcagatcattatatacactaattaaagaaactcagaaagccaatacccatttagtaagatggacacctgaagcagaagcagctttccaggccctaaagagggccctaacccaagccccagtgttaagcttgccaaggggcaagacttttctttatatgtcacagaaaaaacaggaatagctctaggagccatcacacaagtctgagggactagcttgcaacccgtggcatacctgagtaaagaaattgatgtagtagcaaaggattggcttcattgtttacaggtagtggtggcagtagcagtcttagtgtctgaagtggttaaaatgatacagggaagagatcttactgtgtggacatctcatgatgtgaatgccatactcactgctaaaggagacttgtggctgtcagacaaccgtttacttaaatatcaggctctattacttgaagggccagtgctgcaactgcgcacttgtgtaactcttaacccagtcacatttcttccagacaatgaagaaaagatagaacataactgccaacaagtaattgctcaaacctatgccgctcgaggggactttttagaggttcccttgactgatccccacctcaacttgtatactgatggaagttcctttgtagaaaaaggacttcaaaaagtggggtatgcagtggtcagtgataatggaatacttgaaagtaatcccctcactccaggaactagtgctcagctggcagaactaatagccctcactcgggtactagaatcaggagaaggaaaaagggtaaatatatatacagactctaagtgtgcttacctagtcctccatgcccatgcagcaatatggagagaaagggaattcctaacttccgagggaacacctatcaaacatcaggaagccattaggaaattattattggctgtacagaaacctaaagaggtggcagttttacactgccggggtcatcagaaaggaaaggaaagggaaatacaagggagccaccaagttgatattgaagtcaaaagagccacaaggctggaccctccattagaaatgcttataggaggacccctagtatggggtaatcccctccgggaagccaagccccagtactcagcaggagaaatagaatagggaacttcatgaggacatacttccctcccctccagatggctagccaccaataaaggaaaaatacttttgcctgcagctaaccaatagaaattacttaaaacccttcatcaaaccttccacttaggcattgatagcacccatgagatggccaaattattatttactggaccaggccttttcaaaactatcaagcagatagtcagggcctgtaaagtctgccaaagaaataatcccctgcactgcaggccatacatttcaatccctgtatctttaacctccttcttaaatttgtctcttccagaatcaaagctgtaaaattacaaatagttcttcaaatggagccacagatgcagtccatgactaagatccaccacagacccctggaccagcctgctagcccacgctccaatgttaatgacatcgaaggcaccccctcctgaggaaatctcaactgcacaacccctactacgccccaattcagcagaaagcagttagagtggtcatcagccaacctccccaacagcacttgggttttcctgttgagaggcgggactgagagacaggactagctggatttcctagactgactaacaatccctaagcctagctgggaaggtgactgcttccacctttaaacacgggacttgcaacttagctcacacctgaccaatcaggtaggaaagagagctcactaaaatgctaattaggctaaaacaggaggtaaagaaacagccaatcatctatcacctgagaacacaatgggagggacaatgatcaggatataaacccaggtattcgagctggcaacggctaccctctttgggtcccctccctttgtatgggagctctgtttttactctatttcactctattaaatcttgcaactgcactcttctggtccatgtttgttacggctggagctgagctttcgctcaccatccaccactgctgtttgctgccgtcgcagacctgccgctgacttccatccctccagatccggcagggtgtctgctgtgctcctgatccagtgaggcacccgttgctactcccgatcgggctaaaggcttgccattgttcctgcatggctaagtgcctgggttcatcctaatcgagctgaacagtagtcactgggttccacagttctcttccatgacccatggcttctaatagagctataacactcaccacatggcccaagattccattccttggaatccgtgaggccaagaaccccaggtcagagaacacgaggcttaccaccatcttggaagtggcccaccgccattttggaagtggcttgccaccatcttaggagctctgggagcaaggaacccctggtaacaaaacctgatgtttgttctctactaaggaataaaacaggcatacatgtgagataactataaagagtcaggacatgatagaggtctgcacactatatcagaagccctgtttccagctctgtggctgcagcatcgcacaactccagtgctctgcctgaggctggctgtgcatgcagagctgagccctaggttttggcaggacaagacatgttttattcagggagatgagaaggcctgtcaacatgtactgccccacctgctgcggccaactgtggcctccatcttccccagtaggcagggatggactgagggaggaaagacacctggggcacatctgaaagatgctttgggccggggacaaaaaagaagtgatagaaaccaggctgtgctttttattgctgtcaggacaattttcttaagacatgggggtttcttttttttttctttttttttttttgagacggagtctcacactgtcgcccaggctgcagtgcagtggcgtgatctcagctaactgcaagctccacctcctgggttcacgccattctcctggcttagcctcctgagtagctgggactacaggcgcccaccaccatgcccggctaattttttgtattttttagtagagatggggtttcactgtgttagccaggatggtctcgatctcctgacctcatgatccgccaacctcagcctcccaaagtgctgggattacaggcatgagccaccgcgcccggacaggacatgggggtttctaaacaaggctcttcagtatcagctcattgtgagtcacagatcagatctgcccagttctcttttgctgttgacattgttgtttcctctgcaggattcagcagtactgaaagggttattcagtcccaacatgggatctttacacaagaaggggagcttgtgaaatgcaagtactttgcaaatagctcaacttattttctttcttgttttgggcagcattccagtgaggaaatatttcacctgatttctcagagtttaggagcatccaggaacgcaaggaataaaaaatgttctgtgaacctgcaaatagctgccaacactgtcattctcaccatttcagttatgagaccaaaagactcaggaaacagtttctgtgcactcaagacatctacagtaagaggaacaataaaagttgtagttaaaaaaaacaaaaaacaaaatactcagagcttgtaccccagactcatctgccacagggactgggagagatccacgggccctaaactgaaaaaatgtgagcctgtggacagcattcatgaagtatggacaggaaacaggtaactgttgcaagaaaaaccctctcaaactgcattcattgagcagtgctttcaatccacagtccttaaattgactttctccttcaaattttagcaggtaacaaaacagtactttattttaatctaattatttttcttttttctttaactttttatttgatatatttcaaaatataaaataatactgcttattgtaatagatgaagtaataaaaagttttataaagaaaaagttaattctcactcatctgctccctactgaagtaaataatattaataacctgataagtgtcctttcccactattctttctgcttatataaatataggcaaaaatccctcctagtggaacaaatctgcttggggttttttttgttttgttttggtttggttttctgagccggagtctcgctctgttgcccaggctggagcgcagtggcatgatctcggctcactgcaacctctgcctcctgggttcccaccattctcctgcctcagcctcccaagtagctgggactacaggtgcccgtcaccacgctcagctaattttttgtagttttaatagagacggggtttcaccttgttagccaggatggtcttgatctcctgacctcgtgatccgcccgccttggcctcccaaagtgctgggattacaggcgtgagccaccactcccggccacaaatctgttaataaatgtgtgaccaattggaatttttcctctgaatcgccttttacatctttgtccatttttcttttaggttatatatttctcacttaaaaatgcatgctagagatgtcaaaaattttttttatttctccagtctattgtttgtcttctgattttgtttatagcacgtagcatggtatcctttgcctctaaatatactctaaactgtatatagttaaatatgcctgtcttctttatatcttctgcatttctaccatacttaaaaatagtacaggtttatataaatattcccagattcttagacaacagttttatcattttgctttttacaataaaatctttcaaccatctggaaactgtttttatatatgaaatctattttccactattgaaatgtctttgtcatattttatgtttcttaaacataatcaaattatatacatccatattaagaactttaccagtatccaaacattacagaataatgtaagaatcacagtggaactgggtgctggtgaaaataatcactgaattctccagtgccagtttgaaaggagaaattattagccattccactggggtgagaaaggccaatgagtttgactgatgttaaccaaagagagattaaaggatggactaaaagtataaaggggtgacatcttggggaaatgcaagtcttgtgcagagagaggaagatgtttaacttatcctactcaactcctttcctatatgaccggaggtgcctagtccagcttccacccactccactaagttgaggaatagctatcatcacatgtctggaagataatcagcttctgaactggcagagcgtctctggttcttgtggcaaagacataaaatgtgggagaaagtagagaaaaagaaagtgtggtagcctgcattcccaccttttattgaggcaatttttcatgtactagtggttttaatgaatctgtataggtctgaaccaacttgaacctgaacctaccctgcctccaaacagctgtcacttaggggaaggctctagcacaggaggctgtggattgacccatgtgtgaactggaggaggaggaggaggttgagcttgagaacgatcaccactccaggaaatcacgcagatgaagggccctgtagccccctgaagaaaacactagcacaccgttgtgagaaagcacacatttggatttctgccaccaagagggaatccatggccaggaagagataagaaccaacaggaaggagaaggaacctctccatcagaaccctgagaaattcacataaggaaacagcatctgagcaaccaagaagacaaggcccctcagcccaggagaggctgaaaagagagtcctttatttctcccaccactctgcccaacagctgagggttgacatggggtgaagtctgaaagaatagcacatctacctgtcagtggagctcccagagtcttcctgctgggtgtgggtggagggtagagctttgactctaaaatactaattaagttcaaaatgaatacacacatagttggaacaaaactgctttagtaactaaaagagaaaggataacctgtttcccagtggaaaagagatgattgataagtgaaaaaaaaatgaaaacaatttcacactcacatttatctcatgacttgaaatgctctagtcagcacagtaatatctggatctctttgggtattttctattaaatgttccgcttattggcttaatccttcacttatatcatattgttttgtttagagtagtttagagtaagtttttatgtcataaaaaaactgatcttaatattccttttcaagaatgcagttgaaagttcctagatatttgttctctcttatgcatttcatcttgttcaaacaaatggcattctgactgtaactactttggaaagtttaacattttaggacattatatttttccacaaaagaaaaatccatctatttaggtcttattttaaaagtaaattttgcatgtttgtttgtttcttacataccttccactttctttttttttgagacaggatcttgctctgcagcctaggctggagtgcagtggtacaatcatggctcactgcagcacagacctcccaggctcaaatgatcctcccacttcagcctctaaagtagctgggattataggcatccaccatgcctgactaattttgttttttagagatggcgtctcactgtgttgcccaggctggtcttgaactcctggcctcaagcaattctcctgccttgaccttccaaagtgcagggattacaggtgtgagccactgcacctggccagatttctgcttttcttattaaatcaattgctaaatattgtatcatctgtgttgcattattactgaaatttttcttcatttagagaaatttattccatataaggaaaaattactaatttttaatatttgcttaatagccaacaatttttgttacttgttgatttttagcagtactatgaccaaagtggcacatgtacatgtttattttttaaattcctgaatagtacagaaaagtctgtattacaaatctggtttcttatttctctccaactttcaatccttgtccataaatatttacacttttaagtctggatcttctagcagtgagctccatatttctaaataatatgttttaactacttcttgcaacatacattttattcttttattttatttacttatttttttagatggagtctcacactgtcaccctggctggagtgcaatggcatgatctgggctcactgcaatctctgcctccggggttcaagcgattctcctgtctcagcctcccgagtagctgggattataggcatgtgccaccacatccagctaatttttgtacttttagtagagacggggtttctcctcgatggccaggtttgtctcgaactcctagccccaactgatccacccgccttggctgcccagagtgttgggattacaggcatgagccaacgtgcctggctgcaacatgaattataggtgttacctgttgactttcgttttgttttttaaatagacttaattttttaaagcaattttaggttcacggaaaaattaagcagaaagtagagagtttcccatatacttccaggcctcacatatccacaggctcccatgctatggacatcttccaccagagtgataacatttgttccactgatgaagctacattgacgtattattattacccacagtccatagattacattagggttctctagtggtgttgtacgttacatgggtctggacaaatatataatgacgtgtagccgccattacagtctcatacaggttgtttcactgccccaaaatcctctgtgctctgcccgttcactcctccctccccccagctcctgacaaccactgatcttgttactgtttccatggtgttgactattccaaaatgtcatatacttagagtcataacagtatatagcctttttagattggcgtctttcacttagcaataggcatttcagatttttccatgtgtttcatggcttgatacctcatgtcttttgagtgctaaataatattctgttgtctggatgtaccacagtttatttacctattgaaggacatcttggccacttccaagtttgggcaattatgaaggaagctgctataaattcatgcacattttgaactcatttgcttaaataagaaagagcataatttctggatcatatgcaaagaatatgtttagctttgtgagaaactgccagttttcttccaaaatggctgtaccattttgcattcccaccagcaaggaaggagaattcctgttgctccacaccctcactggcatttggtatcgtccgtgttttggatttttgccattctatctggtgtggagaggtcgctcattgttgtaatttgcaattccctagtgacatttgcatggagggtatcttttcatgtgcttatttgtcatttatgtacatttttaatacgtttcactttgggggtcatttagccttcacctggcaaaacaaacaaatgaaaatttacacataattctgtgaattaatttttaaaaacttcataaacctcacctttatccacttttattcttacttatatttacctagtcagacttttcagaactttttccaagttgtcagaacatatttaaaataataaaattaaaataggaggaatttttgcctgtcacctttgctcttctctcttttccctcatccactcccacaccttttcttctttagtttccttccccaaccattccaaacactcattatgcccaagcctctttggacacttcgatcaaaattttctcctctatatcatccggaggaaatgcaccgtttgctcagggacacttagctcacctgcttcccacgttttctctcggtctccacttgtgtctggactgagtgttgctgaccaccacagcatcaaagagcctgtgagaccactggatgcagtctgggggtcagtgacctcagaggaaataccttcagtgtcccacgggctctgcaggtcagtgcactcagagtgagcttcctcacactttgctggggaaagtgtccagtagcttcaataatctcatgaccaaaagactgaagagaggggagaagacatccgagttcacattttcaggcaatagtagctgacatttcctgaatgatccttgtgtgtcaggcaccttaggtccgttcatgacttaccacatgtttctgtatgacagcaccatggggaagcttctgtaattaattcctattggataggttgctgctgatggaagtggggtctccaaatcctctatcccagagtctgtgctgttctgcagactgaatatgctttctccccaccccttcctcaggctttggcaaaggagacctctgaaaaatggcacttagtatattattgacttttgttttttaattggcttttggactaatgaggtcagtataatgtgtgaaaccaaactagaaggcagtgctggtaagtttgttgagtctctgacaaatatttggattctgagcaattcaaacatccaggcaactttaaaaggtcttcttcctctgagactcatagtgacttatacaaataaaaataaaagattagtaataatagtagttcatcaaacactgcatttacttatattttctcaaatactattttcttttttttgaggcagagtcactctgttgcccaggctggattgcagtgatgcaatcttgactcactgcaacctctgcctcttgggttcaagcgattctcctgcctcaatctcctgagtagctgggattataggcatctgccaccaggcctggctaatttttgtatttttagtagagacagggtttcaccctgttgtccaggctggtcttgaactcctgtgatcacccacctcggcctcccaaagtgctcaagtgatcacccacctcggcctcccaaagtgctgggatttcaggtgtgagccaccatgcccagcttcgaatactattttctaccataccatttaaatgtcattcaaatttaatattttccacaaattttgaaagaaggcaatcaggcaaatttcatctcagtcaaataatccctaaagttacacatgctgtggctgtacctttctcaactttgtttcccttcatccagttaagacttggttgtgcagagttaggggctccgcaggtgatgacatgatcaaaggccctgacccttgtcacaagagtactcactaagaataaaagtgtttgacatcctctcagcaactctgatgtgtaatcccaccagcaattagtgtttttctttctccgcgttgattacagatagtttgcttttccctgtatgactgcaaaggtgtgtatatttgaatgtatgtctgtatgttgtttgggttgcagggaaggaaggagtagaaaaaggaataagaggtggctgtgattggctggtcgctctgaatgcaaataactctatgcttttcacctttagtgaatatataaatgtctcaggataggagcgataataaataatgccaaagatcttccttagtggtcctgtggcttcattgaaggcatacattgaaatgtttctagccaggtgcagtggcttacacctgtaatcccagcactttgggaggccgaggcaggtggatcacaaggtcaggagttcaagaccagcctggccaagatggtgaaaccccaactctactaaaaatacaaaaaattagccgggcaaggtggcacgtgcctgtaatcccagatactccagaggctgagacagagaattgcttaaacctggagaggcggaggttgcagtgagccgagatcgtgccactgcactccagcctgggtgacagagcgagactccgtctcaaaaaaaaaaaaagaaagaaagaaagaaagaaatgtttctgaacaggggaaaagccaaatgcaatgggcattcccgaaagactgaagaaagaatacgtgcaagttgattcttctggggtttccaggaaagttgggaaaagaaaatgaatcatttaaaaagtggagagctgatgcctggccctctgtacttgtttctctcagggaagaaaggcagcagaaagtagagcagtgtcccagtccacacgtgtccagggaagagaggcttctatttttaactgcagttacacaagactgttggcttttatgtttcagacgcagtgctgtgaaagaccatgtccttgtagttttcattatttcagaggtaaaatggaaagcaggagtaagagccccaatcattaagaacacggcttagctctctgcagatcacagactcagccaccaactcctgccctgtaaccatggagatgcccccacttcagtctgtacacaaccccacaagaggaaccacttactcgcttccttttctaatcagcatgaaataatatttttcataattattatctgaggcttttctatttcctcctctctatctactttgacaacataaaaatatattagggcctggtcgtggtggctcacacctgcaatcccatcactttaggaggctgaggtgggaggatcacttgagcccaggaggtcgaggctgcagtgagtcatgatcatgccaatgcactcagcctgggcaacagagtgagaccctgtctcaaaaatatatatatatacacatatgtattaggcattatgctgtacacaaagagcttattatctaatacacatgataatatctgtcactagatgtaagctttatagagataccaatttttttatccaataaccactaaccaaacaatgatcaaataaataaatggcaggttatatgtataccgatgtgtaaaggcaaatttatggccaatggttaaaatttactgaaaacaaatttcagctcgctataaaaaagaactagcaatcagagttttcccaaaaagaaacagacagctttaaggcataaaatattcctttctacaggaaatattcaaagaaaagtagaatgcccatttccagtgatgttgcagaattacaaaatgatatgattttgtgcaaaactaaaacatgtaagttttgtatgggggaaaatagcatcgaagaacagaacaaccaaacagcttgtaaaatgcatcgtgaataaaaaaagctacttccagcttaatggaaattggattttggatttgtatttgaagcatgtgtaggatttaaaatgagagagatggtaagagaatacatgccaggcaggataatcttatcaagggcaatgatcaagaaataacagagagaaaggtttaggaaattagaagtttccaaatatgactgaaagaaccaatttttattggaaaatgctgtgagataagagggaatcttggcttgagacaattgttagtgtaagaggactgcacacagcccagaactgggtttctttccagacaaagagaaaatggtatgagattatccatccttaccataaacaacattaaggaatatcttgaaattgtttttcagaaagagctaatattaacctaaatttaaactgttaaataacatcaaagatttactttacaagcacatttctaaatgtactgaaaaactatatttccataataattgattcaatggacagataaatttccttttccctgagtagttctatcatcaactaatagcccttattgcaggaaacgaaaaatctaaacacttttccgaaagtgtcgcgattccccgatcactttccagcgtgaattttcttaggggtgaggatgggaacactaatagtttctctgcactcaggaacctcataaaggacaaactttcaaatcaaataatacagaccaaataaataaaacagagctacatcttgctttgctttacacttcgttctcttccttgtctgtctgcaaaaacctttgcatgattttcattgaaaataactcctgaattgatgcgagattttacttaccctgggacctacccaggcctggtttagatatgttcccatagtcttccctgctcttccgggtactgagttaccataaggataaaccaggcagacagttcttagacattagggctaatttctaatttacccccctgtgtctttcttttatcatcacaaacatgtttggtgtctaatttggtttactcttaggaaaggatggtttggagtacataaaacagaatggttcctcaggcagcaatatgctacagttttagagatcttgtagctctatttttctattaattgatgcaggttttgagaatcaacaagcacattaaaaatagacatcaacactatagtaaaattaaaacagttattctgtcttttgttgttgtttccacattattcagaaagagaaaagtactctttaaaattagaaatggagaacaacaaggaagagaaatctattttgttgaaaaacagcttttggtaatattattcagtgaaagatgaagtgacagacgtggaaacttctagtcaaagtttgcagcttttatttgcattgaatatctatccaagatgaatcatcctagaaaagcagccagtggacttggaataatctcgctcaccatggtttctgccaaggaaggattttcttggcgcagaatgttgggtatttatttggggtcttgaatgggtgaaagagacaaagaacaatttacgagaaagaaaggagaagaaggaatggatccatggacagaaaagatttgtcctcaagggtacatccaagatttgctttaatctgtcatataatggaaatttgaaacagttattagcacaggttcacagcttctcaaaactaaaaaccattgtggaaaagaggctaagcacaaagatgtaagcactaaatgagtataactgctttgcagacagtttcatgtcagtggacatgtgccatttttcttctttttttttttttttctgcccagtgcagctgccacatattattcaatgcacaactttacagggcatcattcacatcttagtaagacatggagaaagacaatgctgagataaagaaaagcagatttccgagagcatcatcagagcctacaaattcagctctgcctggagctgcaaaagtcaaaatattctttttggggatcaagccagcatgaattgagattctgtcatttacagccaatggattcataattctcatagccaaaagggagagggatacttttggttctctgttattttatgagctgaatttatggtccacagaagcattttctactcaaaataactagagttatgtaaagacaaataatcattggtctactctcattatgggaaataagagccataataaccctatgtgtgttttatgaatttcaaatgggaaaaattttgaaaactactaaaaattcataactctacattataaacataagaactcttactttttctatttttactttttaatttccacttttgttactatttttacttattttccttgtttacatttttgcacatgaggaaatcatattgtaagaataattttatgaaattttattctcatttttagaattaaaaatgccttggatttatagtttgaattggctactatttcacaccgtagatatacaatactttataattttcctgattggggatatttttattatttatttccaatttttattattttaaatagcattgtggtaaacatctttaaatatacattttattttatttatatatatatttttattatactttaagttctagggtacatgtgcacacgtgcaggtttgttacatatgtgtacatgtgccatgttgttgtgatgcacccattaactcatcatttacattaggtatatctcctaatgctatccctcccccctccccccaccccacaacaggccgtggtgtgtgaacttccccttcctgtgtccaagtgttctcattgttcaattcccacctatgagtgagaacatgcggtctttgggttttttgtccttgtgatagtttgctgagaatgatggtttccagcttcatccatgctacaaaggacatgaactcatcattttttatggctgcatagtattccatggtgtatatgtgccacattttcttaatccagtctatcattgacggacatttgggttggttccaagtctttgctattgtgaatagtgccacaataaacatacgtgtgcatgtgtctttatagcagcatgatttataatcctttgggtacctacccagtaataggatggctgggtcaaatggtgttgctagttctagatccctgaggagttgccacactgtcttccacaatggttgaactagtttacagtcccaccaacagtgtaaaagtgttcctatttctccacatcctctccagcatctattgtttcctgactttttaatgatcgccattctaactggtgtgagatggcatctcattgtggttttcatttgcatttctctgatggccagtgatgattagcatttaattttcatgtgtctgttggctgcatgaatgtcttcttttgagaagtgtctgttcatatccttcgcccactttttgatggggttctttgtttttttcttgtaaatttgtttgagttctttgtagattctggatattagccctttgtcagatgagtagattgcaaaaattttctccaattctgtaggttgcctgttcactctgatggtagtttcttttgctgtgcagaagctcttgagtttaattagatcccatttgtcaattttggcttttgttgtcattgcttttggtgttttagacatgaagtccttgctcatgcctatgtcctgaatagtattgcctaggttttcttctagggtttttatgattttaggtctaacatttaagtctttaatccatcttgaattaatttttgtataaggtgtaaggaagggatccagtttcagctttctacatatggctagccagttttcccagcaccatttattaaatagggaatcatttccccattgcttgtttttgtcaggtttgtcaaagatcagatggttgtagatgtgtggtattatttctgagggctctgttctgttcaattggtctatatctctgttttggtaccagtaccatgctgttttggttactgtagccttgtagtatagtttgaatacaggtagaatgatgcctccagctttgttcttttggtttaggattgacttggcaatgtgggctcttttttggttccatatgaactttaaagtagagttttccaattctgtgaagaaagtcattggtagcttgatggagatggcattaaatctataaattaccttgggcagtatggccattttcatgatattgattattcctatccatgagcatggaatgttcttccatttgtttgtatcctcttttatttccttgagcagtggtttgtagttctccttgcagaggtccttcacatcccttataagttggattcctaggtattttattctctttgaagcaattgtgaatgggagttcactcatgatttggttctctgtttgtctgttattggtgtataggaatgcttgtgatttttgcacattgattttgtatcctgagactttgctgaagttgcttatgagcttaaggagattttgggctgagacaatggggttttctagatatacaatcatgtcatctgcaaacagggacaatttgactttcccttttcctaattgaataccctttatttctttctcctgcctgattgtcctggccagaacttccaacactatgttgaataggaatggtgagagagggcatccctgtcttgtgccagttttcaaagggaatgcttccagtttttgcccattcagtatgatattggctgtgggtttgtcatagatagctcttattattttgagatatgtcccattgatacctaatttattgagagtttttagcatgaagggttgttgaattttgtcaaaggccttttcggcatctattgaggtagtcattggtttttgtctttggttctgtttatatgttggattatgtttaatgatttgcgtatattgaaccagccttgcatcccagggatgaagcccacttgatcatggtgcataagctttcggatgtgctgctggattcggtttgccagtattttattgaggatttttgcattgatgttcatcagggatattggactaagattctcttttttttgttgtgtctctgccaggctttggtatcaggatgatgctggcctcataaaatgagttagtgaggattccctctttttctatttattggaatagcttcagaaggaatggtacaagttcctccttgtacctctggtagaattcggctgtgaatcatctcgtcctggacttttttcggttggtaagctattaattattgcctcaatttcggagcctgttattggtctattcagggattcaacttcttcctggtttagtcttgggagggtgtatgtgtcgaggaatttaaccatttcttctagattttctagtttatttgcgtagaggtgtttataatattctctgatggtagtttgtatttctgtgggatcggtggtgagatcccctttatcattttttattgcgtctatttgattcttctctcttttcttctttattagtcttgctagtggtctatccattttgttgatcttttcaaaaaaccagctcctggattcgttcattttttgaagggttttttgtgtctctatctccttcagttctgctctgatcttagttacttcttgccttctgctagcttttgaatgtgttttcccttgcttctctagttcttttaattgtgatgtcagggtgtcaattttaaatctttcctgctttctcttgtgggcatttagtgctataaatttccctctacacactgctttaaatgtgtcccagagattctggtatgttgtgtctttgttctcgttggtttcaaagaacatctttatttctgccttcatttcattatgtacccagtagtcattcaggagcaggttgttcagtttccatgtagctgagcagtttggaatgagtttcttaatcctgagttctagtttgattgctctgtggcctaagagaaagtttgttataatttctgttcttttacatttgctgaggagtgctttacttccaactatgtggtcaattttggaataagtgcaatgtgttgctgagaagaatgtatattctgttgatttggggtggagagttctgtagatatcaattaggtctgcttggtgcagagctgaattcagttcctggatatcattgttaactttctgtctcattgatctgtctattgttgacagtggggtgttaaagtctcccattattattgtgtgggagtctaagtctctttgtaggtctctaaggacttgctttatgaatctgggtgctcctgtattgggtgcatatatatttaggataggagaattgatccctttaccattatgtaatggccatctttgtctcttttgatctttgttggtttaaagtctgttttatcggagactaggattgcaacccctgcctttttttgttttccatttacttggtagatcttcctccatccctttattttgagcctatgtgtgtctctgcacgtgacatgggtttcctgaatacagcatactgatgggtcttgtctctttgtccaatttggcagtctatgtcttttaattggagcatttagcccatttacatttaaggttaatattgttatgtgtgaatttgatcctgtcattatgatgttagctggttattttgctcgttagttgatgcagtttcttcctagcatcaatggtctttacaatttggcatgtttttgccacggctggtgctggttgttcctttccctgtttagtgcttccttcaggagctcttttagggcaggcctggtggtgacaaaatctttcagcatttgcttgtctgtaaaggattttatttctccttcacttatgaagcttagtttggctgaatatgaaattctgggttgaaaattcttttctttaagaatgttgaatattggcccccactctcttctggcttgtagagtttctgccgagagatccactgttagtctgatgggcttccctctgtgggtaacccgacctttttctctggctgcccttaacattttttccttcatttcaactttggtgaatctgacagttatgtgtcttgtccactccagaccctgtttgcctgggtatcagcagcagaggctgcagaacagtgaatattgctgaacagcaaatgttgctgcctgatcattcctctggaagtttcatctcagagggatacctggccgtgtgaggtgtcagtctgcccctactggggtttgcctcccagttaggctacttggggtcagggacccacttgaggaggcagtctgtccattctcagatctcaaactctgtgctgggagaaccactattctcttcaaagctgtcagacagggacatttaagtctgcagaggtttctgctgccttttgttcagctaggccctgcctcccaaggtggagtctacagaggcaggcaggcctccttgaccttcggtgggctccacccagttcgagcttcccggctactttgtttacctactcaagcctcagcaatggtgggtgcccttcccccagcctcgctgccgccttgcagttccatctcagactgctgtgctggcaatgagcgaggctccgtgggtgtgggtccctccaagccaggcacaggatataacctcctggtatgccctttgctaagaccattggaaaagtgcagtattagggtggaagtgtcccgattttccaggtgccatctgacacagctttgcttggctaggaaagggaatttgctgacctcttgcacttcccggatgaggcgatgcctcgccctgcttcacctcatgctcagtgcgctgcacctactgtcctgcacccactgtccaacaagccccagtgagatgaacccagtacctcagctggaaatgcagaaatcacccatcttccgcgtcgctcatgctgggatctgtagactggagctgttcctatttggccatcttggatccacccctaaatatacattttaatttaactttttatcgtttcattaagacagcatcctcgaactggaattagtggttcaatgggcaaaacagctttatagcctgttggttccttgtctgtcttaatagcataacaccttttaaaagctttctaaattccttatctctactccctaacccctttcttactcaaaacccagtccaggcagatttttatccctatccttgtatcagaatcactttgttaaggtcacaatgggtttcatagcctcaaatccaatgatccattaccatgttttatcttactgaatttctcagaataatttgacaatttggttattctctccttgaaacattatctttgcttgagtttggggattccacactttcctggtttgctttcaacctcacaagccactccttttctagctcaccttcctcttgctgacctctagatactgtgttgtctcaggactcagtcctcaaacatatatgccgtctacatgcactctctaagtgatttcatccaggaatatggctttaattaccatccatacattgatgactcccaggtttatacctccatccaacccctctctgttgaaagccaggctcatatatactataatctatataacatctttgccagatgtctgtctggcatctaaaatctaagatatccacaacataccttattccctcccttacgctcatccctcactcttccccatctcaagaaaacagtgatataattcacccactcgctatagccaaaaatactggaatcttctttaattcttctctttcccccataccccacattgtcaacaaactggccacataagatgtgttttctgtcagaaaaaaaagcctgacttcattttttaattcaaataagaatgttacatgatgggttccaatgacaacccagtcatttcataattctaattctaaagtaggtagatgaatatggtaaggaaccttgcattgaggctgtcgccagttgaaatatattcctgttttgcaatatttcttgcttagcttttaagggctctcccgcagattccagaagctaataaattgtctctttatttggcagcttgggaattttttttttagcaccctggaccaatgcaccattccggatggttgagatatatactttttctttaaggggtaggaggtaagggtgatgttggaaagagaaatgggaaagaagcagcagcttaacatttggaccctgaagcatgttctagagcaggctggttttaagaaagtcctcatttgcctcaaggtacgtgaccccagtttaatgactataggcctaaatgggacaggatcacaatcacatttgtcaccagcagactcatatctaggaggcatacaagttattcctgttagaacagtgacttactggaaagtcatttcccaccactgatttgagtcgctgttattatcgtacatgaatttccatatacaattaggccatattacagatttgctattccatttaactaacctgtctgcctacccttaattttcacttaagaattttctttctctttcttttcacttctgtgcaatagaaaatatactcttttcttctacattttcttctgtttttttttgttttggcataagaatgacaggaattttttaaatgtttaattgtagccaatcctttgctagtggtctttgtcctcttttaggttttctgatgtacagtcattttatctacttacatgcagatgatgttttatctcttcctttccaattcttatgcttcttattgtttctctgggctgactgcattagcaagtagcttcaacacaatcttagatagcagtagtggtaatgaacatctttttccttcacctactttaataggaaagcctctagcactttcccataagttggtgctggtttgggattacggtgtatgcaagttttatgtgatatgttaaagaattagttattagtttttatttttcaatgttttaacatgaatctgtgttgtattttgtcaaattccttttctccatcaataaagataatcatatgattttttttcttggctcttgtatcagttattaagctactaactcttacctacaattgcttagctcctatacctcgcttctagagtagtaactgctgatgtcaatcatacactggcccctagagctagttgactttttaggtgtgtttttcttctctctccaactggataattagcatattctattttgtacattttattaaatgtctccacagggttaagtgaatttgttgaggtagtgacactcaacatttattgtttacctgccacaacccctgtccatcattgctcagtaaaatcgttaatcatctatagctagacatatacctgctagtacctacctagaatgttgaaatcacatacctgagataagagagaagaaaaattccaaggagaactctcatgtaaatgctacttcctccaagcatctaaaacagctcctctattctttctaggaaaaaaaatcccttctttgaggacattcctggtaagtatcctcataaatagaaaaaaaattttacaaagagaactaaagttttgctagcatttctgtggtttcagacttaatgtgatgtggggatgctctgattgggaaaaagaaagatcataaggtttctagggaagtgtaccagtttacaaatagccagattctccagtgaccacctcatgtgtctattgtttttttctcaagcagaaatgtgaaaacaggagaaggtagagtccagtcttacccaaaccctgcatgtccaggagaaagctaactctagtctaagctacaaaaaacgaaaaaaaaaaaaattctccttgttttacataatttcatacacaaaaaagaatggaagagtaatatccacaattaacatcaaagatcctcttattcttcatagactcagtgtagaggctcagacacttatgtcatgaccacagaaagaaatgaaggaagaaaagaatgaggatagatttgctagggccagggctttacccaagaaatatagctgagaaaatgtgggagggtaataggtaggcacctatgctccacaggatgagacctggatgcaaagaacagatgagagctttcttccctatcctctcctcatcttgagtccctagtcattgctgcaagtacaggaaaccataaaacagagtttcagaaaactaatatgtaaaacatgagaaattaccagtgtgcacaggtgcccagagctaaatataaagcacttggatatttgcaaaagcactagcatgctcagagttagccagttactagactgctttctcacacctgaaaacatcctaaaagaaaggatactacattttcctcctttgtctttttaacgagaatttggaaaaggtctaactcttttaacttatttaaagctgctgagattgagacatataatacagctctggtagaaaaataatcaattaagggaaataatcagatcttctctcaacctattcctacccccctcagaatgtactacagtgccatagaggcaaaaagcctgcataattctttaaaggtgaggggagtgagggagtttcaggtgtaaaggattttcagacagtcataactggagaaactttccttttaacactgtttgctttctttcttttttgtttgctcctcacctctctgtatgttccgtctacctttcatttcaacataacgagttactttatattaagggggaaatgaaaaaacaatttttttgagttcagaccacctgggggcagtgcttcctttgacagaggcactgccagaaactagaacaaggggaagggaacagcaggaggagggcattcaatgatgtgtgtgatgtaacagtgaggttttgattatccgtaaaaacaatgaagattccccaaaggctacccaaccaacagaaccagaagactctagaacagtgaactaggcccagtgaacacggccaaatctaggtctccaaactgaatccacagaggctccaggaaaaggaaagaatggaaactccactgagcactctgctgctgctcctctgtgtgcagctgacctgtgagtcaggcgagtcatgaggaggggaggaatcaagtaggggcggccagggcattgaaatttagaaagatcccggggacaatcttgggtctagtctcaggaatgtaaaacaaataatgaaactgatgaacaaacacactatatatatgaaaatgtttcattcctcctaagcagggtcaaatggacaactgccagtggaacagaatgctccttccctgaaagtcaaggaaggtgacagcgtcacactgaactgcagttacagagacagcccttcagatttcttcagtggttcaggcaggatcctgaggaaggcctcatttccctgatacaaatgctatcaactgtgagagagaagatcagtggaagattcacagccaggcttaaaaaaggagaccagcacatttccctgcacatacaggattcccagctccatgactcaaccacattcttctgcgcagcaagcacacagtgcccacagtcacctgcacccggtacctaaagcttgctgaggggcctgggcacacctccttttataagggccctggggcactgactataactctgctgcatacaaagggaaatatgagggactgttttataacataatatcaaacatttcatttgaagaccatgtgaggaaggatagtgttttcaaataccatctaaagtactttgtttctcagtgtgaggcccttcctttgtgaaaactagcccaaaaactagaggctaaatatcaaaaaggagagagcactaaagaacaaagaaagaacagggtaaaattcttgtctttgagcttctttgtagacttttacaaagatatagaaaatacaaaatcttgaaagccatgaccatcaaattcagtagtgaaaggaaaaatattttgacatgccaaaaagattggcttagaagatcaagtaccaaaatctgagggaaaattgtacaaagcatttaaaggaaaagagaacacaacatggtagaaaagctgtcttctccttaaaagggataaaatgccaaccagctagctagaaaggaagtcaatgatgtgaggagaggtcataaacagtgagtccagcatcctgctcttttctagggtcagagctctgagcaggtagggtgggaggagggtgagtcacatttagcaatgactctgaactgaaggaacagtgaattttggcaaaaactgttttgatcattgtgtcttatatcaatactcacaagaaaacgcccattacagaggaagcattcaacaaccatgtggacaagacggtcggtccaaagcatgtcagccagccagagaatgtctgtgcttgtcaatttcttgaacaatagacccatgaatagattagctgaggtgacagattgagtttctttataagcccagaagcatgggttttctcccaccaagacagattcagctacttctgctgctgtcacaggacttttccttagttcaaagacagggttcttttcccatgggcacgaaaattcaggctcgcaaacaatttgaatggtgagtaagacacggttttattgggtgaagaggaagaaaagggggaaacagggactcttacaaggccagagtccctgctagagcacttcccaccccgcagttcgaatcccaggttccacacaggaagaggaggagcctggctcctccccactgcaaaggatgccaacttctgcggctccaccccagtgcacaggctgcttggaatttctctagggaccccctcccacctggctgtctcactaccaaatgtccaccctgtcagcagtaaatacaacactgagccttcgatgtggaatcatccttcaaaggaaccagccacacactagttggcaagttgattacattggaccacttccaacctggaggtattaggaattttttttcttcttaatacatattctgggtgtgaatctgtggtctcctccaaagtgccacacatagttgcatgaactgatggctcagagtgtctcattgatcattctgatcatcaaaggatttcacatcccttgcatcaacagacccactttatatcaagggcgtgtgacagtagtcatgtcatatagcatatagcttcatcatacagcattagccatgaaccactagcctgatagaactttggaatgaccacttaagggcccagctaaagcaccagcttagggacagcaccctgaggggctgaaaagctattctttgagatagtgttgtgtccctgttacataaaatacatggacctgggtagcaagggatggaagtaggactatcaccccatcaaccaccactttcagtaacccacttttgtgcttcctgttcttataactataggttctgctggactagggattctgtttccctttgagggggaaaagggaggatgctgcttctacgagggaaataggtttttaccaaacccaagataatatatactacctcataatttggggatcttcatgccagtcctggaggccaagaaaggagttactactgtcatggacaagttgatcctgattatcatgaagctaaaccccatagcggaactggggatatatgtctacaactcagggaattcactgtgatgacttttagcactttcatgtcagtgattatcgtaaataggcaactgtagcaactacagcctgacaagagcagactaaccaggggcttatacccctcggtgatgaaggtctaggttacctccctggaaaagaaatctagagcagtagaaaaaaatgctagccgaaggtggggagaatcaagaataagtagtatagaaggtagatggaggagataataaatatgagttgcagtcatgcaactaactataacaaacgtaacttgtcccagtaaccctcttgttgtcaaaacaacatcaacaacaaaaactagtgatctatatgaatttaacacacagcacaagtggatctgagcaaggcaaggagtgaactgtatagatactgttggttccctacctatatctcctaggcagtcacgccaacatgctggacaccactcgctgaaaatcccagcaaccctgaagatgactttgactttctggccatgaatgtggaggctgtggaggacaagccagaaatgcaaaagagttaatgccccaaaagcagttcttaatcagtgatagacagggagtttaggcatgattactccagtttcttcatgactcatttggcatagctccaaagagtatgctatgctgtctcttagagttattgtgacaggtagttagacaggcatgaatggggcacaagagagctctcccctccacccaccaggagtcatcaggcgattgttcggcagttatcacattacctctctaaaaatgataattggcagcaaattatcactggcaacttccccaacagataaagacacttaagattggtaatcagcttccaataaaatctcaggaattggtgagtgaacccagcatgtacattaagagacaaaacagcagagtatgaccttctgtgggcactccaccagaaaaaggaagaaagcctcagatgtgcatgagtacaacttcctaaacacactgctcatgcccacgtcccaagcaggaaggagggcactgcacatgcgggcagcccatcctaagggaagaatcatgggaaaggggcacaagatgctggaggtaggtcagtgtataaaatcttaggattaaggttaaaggctgcacttgtccttccagttgtccgcttgggtctcttccaagtgtactttcctttctctcctgctctaaagctttttaataaaattccactcctgttctgaaacttgccttggtctttcattctgccttatttccctcagtcaaattctttctgctaaagagacaagacttgaggttgctgcagacccatatggattcaccaccagtaactcagagccttctacccctaacattatccagctgcagaaagctgcaattgcccatcgtggtaactgccttgatggcacattctgtattggcttccttccttccctgatttacctcttacccatgtcttgcaaacaaaaaagagttaaactctgtaaaatagttaaagaggttgattctgagccaaatatgagtgaccatggcccatgacacagccctcaggaggttccgagaacatgtgcccaaggtggtcgcagtgcagcttggcttatacattttagggaggcatgggacttcaatcaaatacatttaaaaaatacattggtttgatccaggaaggtgggacaactcaaagcaaggggcaagggggtcagtgggagtgaggagcttccagcttataagtagatttaatatttttctggttgacaattggttgagtttatctaaagacctggaattaataggaaatgtctgtattgcgataagaggttataaagaccagagtttggtcaggcagatgaatcttccaagtagcaggtttcagagagaatggattgtaaatgcttcttatcagacttcaggtctgtgttgatgttaatgccagagaggtatgatgaagcatgtctgacccccacttcccattctggcctgaaccaatctctcaagttgaattttaagagagccctggccaagaaggaagtccactcagatggttgcggggggctggggggccttagaattttatttttgatctacagtttcctagaatcacctataataaactatttacacacaaattattgtgtcgaagctgacttttagggatccaaaaccaagatacaggaattcaaatcatgagacaagggtgaagattatccagaagaaatgttggtgccccttctcttattgctaccaagctgagctttgcagcacaagggattttagcagtctcattcaggatgggccccagtgcttacaaactccttaagcatctctctgagaggggacactcagccacctacctctgtgacagagaactcatgctcctcacacagcacccagtacataacagggcccccattcataatgcccagtttggggaccccaactcaggaattacataaggatccctgatgctccctctggaaatgcaaaattctaaagaatcagagtaaggtatttaaaaagagtttttttcacaatattttttcaaaatggaatgaaaatgataagagcaattcttgatataaatataaattaagctgaggcaatttagtgctgatgagaacttctgcaatagttatttcagagcttcttgatatagcataaacaaggtggttttgtttatttgtttgtttgcgtttgttttttgagatggagtttcactcttgtcgcccaggctggagtgtggtggcacaaactcagctcactgcaacctttgcctctcaggttcaagcgattctctgacctcagcctcctaagtagctgggattacaggcatgtactaccatgcccagctaatttttgtatttttaatagagatggagtttaaccatgttgcccgggatggtctcgaactcctgacctcaagtgatctgcccacctcggcctcccaaagtgctgggattacaggtgtgagccaccatgcctggccaacaagattatttttttaatccatgtaaaatgtgaacacaattacacactacatattctgcttttacttatctctgaatttagtcgatgctcttttcagccacaagcatatatcttttttctcattctttattttgagaaattataaaaatgtaaaaaaattgaatataaataggcatattcttatcactcaaaattaagtgtccttatttcataagatttgctttgtaattttttttaataagaagaaaaataaaatcacagtttgccatttgttgtgaatggagtcagaggcttctgctcaccattctggatcacgctctcctctccaagattaggtcgtattaaaaacaaatttgccagctccattttctctttatttttcttctaggctaactaaaagcactccagaaacattttttattttcatttgaaattataaccagaggcctattttctgagagaccaaaaagtattcagaaatgtttccctccttgaaacctagtcacccacccacctatcatagcatttcctgccctgaaggagaattctcaccaagcacagaggagaacccatcagagcaggagacttttcactctgcaggggagcgctgtcagcatgacacgagttagcttgctgtgggcagtcgtggtctccacctgtcttggtaaggaagatgtggttctttctttataaaggcatctaatggggctgtgaagcaggagggattaacagaacagcaactgcattgcctcttagagcccagctacctggaggcagaaatatgctgcctgaggctagaatcacaaagaaaggtgtgtgggaatggggaatgggaatcagcttgtgagtctgtttctcactcacacgtgatatcccagtgaagtcctttctctcctattttccacagaatccggcatggcccagacagtcactcagtctcaaccagagatgtctgtgcaggaggcagagactgtgaccctgagttgcacatatgacaccagtgagaataattattatttgttctggtacaagcagcctcccagcaggcagatgattctcgttattcgccaagaagcttataagcaacagaatgcaacggagaatcgtttctctgtgaacttccagaaagcagccaaatccttcagtctcaagatctcagactcacagctgggggacactgcgatgtatttctgtgctttcatgaagcacacaatgagatgagcagcagggagaggcttacagaaacctcagacctcagcatctgtgcaaaggtcacagggtgagagggaagtggtagggtaataggtatagaaaatcattgacttctcttggaaatgaaagcttctcctatttcttctcctgtaagaaactcagagagatggctgtctgcaagcttcaatccttaaagttacataaagataatgacgtgtgcagtgcattccagttttacaaggtgccttcactaaggtacttattacaggtcagatttcctaagcattttctctgtccagaaaatttttataatttgcctgggcattcttacctccaggaattttaaaccttttccatttgttaattgttgcttgtccttttatttgtccatctggtccaaaactgcatctcctccgaataaggtacccattttagaacacaacaggtgtgacaacggtggcataaccacgaaggggacttgctgggcccaccagactcaagagatgacctaggtccactgcagtagaacctagaagaatgatgaaaaggctttaaaatgctccgctgaagggccagctcgtgggcaacacctcagtggttggaatgctatgcttcagaaaatgataatattcgttaaaccactggctgattcatggtgtcgtggcaaaagtttagaaaccaagaaatagacatagaatagagtcttctcctatcactccctataagtcattttcagaattcgtgtttccctttcccacaaccctaggttctgctagattagaggtcctagttcccaaagaaggatgctcccttcggggattcagtaacctgcagctatggctgccacttttaggtcactctgaactctctgtgccaatagcccagcaggcaaagagaggagctattagaccagaaggggtcattgaccctgactgtcatggagcaccaggttgttgtgacacaaggagggtgaggaggaatgtggctataatgtaagtatttcacattggtgtctcctgatgtttccgtgcccaatacaaacagcaagcggcagttcttgtagcagcaaggcctgaaaagggcaacgtgaccaagaactgagactcttcagcaatgaagttttcaagaacagaagctcatgtcatgcaaccttcctgtattaagggcgttgaagagattgcagtcagaggcaaccttgaagacacagtgacacagtggaaataatatagggcaagcatgcatctgagtagtgcaaagaaaggactgtaactgatatatgcgccctgttgccccatccgaatgtctgtctgattttagctggagttatagtagacaatcacactcacgtcatgctggtaacatccagcgttaagcacactctgtgttttgttatgttatgttttgttttgttttgttgctttctatcccaaagtcttctctaatgtctcaggagatcccttagtttaagggcaagcacagcctgaaattatagggaaactaccacccctgttggcaaacaccaaccaatggggaaaaagagccagggaataaacgcactagctttgcgtcccttaaatagacaattctgagcggcaacctgtgtgcttcttgggagatcctaccagaaccgagtcccacttgagtcagttattgctcgacccactttcttcttttataacttatttttatagatcaagggagtacaagtgccacttttgatacatggatatattgtgtagtggtgaagtatgggttttcagtgtaaccatcacctgaatagtgtacattgtactcattaggtacttttcattcctcattctcctcccacactcccaccttttcaagtctcaatgtctgttatctttgtccatgtctatgcattatttagctcccatttataagtaagaaatgtagtatttgaatttctgtttctgagttacttcacttaagataatggcctccagttccatccatgttgctataaaagacatgagtttattctttttatggctgagtagtattccatggtgtgtgtgtgtgacattttctttatttaatcatccatccattgatggacacttaggttgattccatatcttttctattgtgaatagtgctgtgataaacataacagtgaagttatatttttgatataataatttctttttgtgggggtagatacccagtagtgagatgctgggttgaagagtagttctatttttagttctttgagaaatccctatactgttttccacacaggttgtactgatttacattcccaccaacagtgtatatgtgttaccaaacatctgttgttttctgacttcttattaatagccattctaactgatgtgagatggtatctcattgtgcttttaatttgcatttatctgatgattagtcgtgttgagcattttctcatgtttgctgaccatttgtacgtcttctttgagaaatgtctgttcatgtcctttgcacacttttcaatgggcttatttgtttcttgcttgttgagttgtgtgagttccttgtagattctggatattagtcctttgttggatgcatggtttgcaaatgttttctctcattctgtaggttgtctctttactctcttgattatatattgtgtggtacagaagctatttagtttaattaagtcccattagtctattttttgtttcgttgcatttgttttaagatctcagtcataaattctttgcctaagccaagatccagaagagtttttcccaggttttcttacagaatttttatagtttcaggttttatatttaagtctttaatccatcttgactttatagtaagagaaatggatccagtttcattcttctgtgtatggctaactaattttcccagcactatttattgaatagggtgtcctttccccagtgtatgtctttgtctactttgtcaaagatcagttagttgtaggtatgtggctttatttctgggttccatattctgttccattgatctgtgtgtctatttttcatacaagtaccatgctatattgatactatagccttgtagtatcatttgaagtcaggtgatatgatgcatcaagatttttctctttgcttaggattgctttggcattcaggctgtttttttgtttcatattgattttagcattttttcctaattctgtgaaaagtaatattggtattttgataggcattgcattgaatctacatattgctttgggcaatatggtcattttaataatattgctttttccagtttataagcatgagaggttttttcatttatttgggttatccacaatttctttcatcagtgttttgtagttttcctagtagagatcgtttacctttttgtttaagtgtatttctaggtattattttgtggctattataaatgggattatttattttgtggctattataaatttagtttgtagcttggttgttactgatgtatagaaatattactgatttcatacattgattttgtatcttgaaactttactgaattcacttatcaaatctgggagtcttttggaggagccttgagggttttccaggtataagacatatcatcagcaaacagatagttggactttttcttttccagtttggatgccttttatttctttctcttaccaattgctctggctaggacttctagcactattttgaataaaagtggtgagagtgggtatcctgctttacccattttctcactcctgcttcctgagatcacttcctaaataaactacctgcacccaaggtagtttcaggctctgtcttggggggaaatcaaactaatacagggaatctttggaaatccaaagattctttgaaaatttaacaaagaaagaacagaggagagttcaaggtgaaccttactgggctaagctaataaaggtaagtgtgtacttgagtgagaaattgtaaaaaaaagatgatgaggcagatcgcatttactaaactccaatctctgcagatatgtgattacgtcttttcagtgttcaaaaactttactttccaagtttaagctctttcaactgtctctcatttccccttcccaaatcttctgaccctttactatttaaacttcattcctagttattcccaaaatacgtctctcttctagtcagtttattccccttactggctcataaggacttaaagctcattgctggctctagcatttctctactggttgctccacccacccaaatttcccttttgtgtatatttcagactgcttaaaccatattaatcttataatgaccaccagaaatctctcttccctctaagatttcttctctaataatcaaacaatcctttaattccttctcttccaaatgtcatacagtaccaactgtggaccaaacaatccgactcttactgacataccttcctaagacatttgctgttgtttcaaggtactcatctttcctccccaaatacattatattctctatgtagatagagtttgccttgtacccttcacaattcctcactgctcttagcacagtactaagcacataataagtgctgataaggcacaaatatgcttaaggtttaaattataatcatgctatatttctgaaagaatatgaaggaaaagaaacaggtttctctgaggaggtaagatgtgatagaaggtagaatttaagaaagcagtgataaaggaaaggacagatacatttcaaacatccaagtcttttgatttagtggaaacataaatctgaaactggtaaaaagattacttttagaatacatttcttactaaaccaagttctttccatacagaaaatcctagaaactgcctctgtaattatctctttgatctgaagagggcactgtttgctcctgttgatagcagttacttacaaaaaaccgatctcattttgaagaatccgctattcctaatacatacaaaataactagaacaaatcctatgttatccgtagagtctaggtcagatttccacattctggaatcaagttttccaccaattaaaaaggtcaaaccatggaggagcttttaggaactgtatttgtgatctggtggctttggcctgggtgagagctgagtgaattcatttcatcagggacacagaggactcagaaggttctgagaactagtctctatattttacagaagggattcaaagaataaataaaacatttaatttaccctttatttaatttacccttaattcatcttttttaagaaaatttgctatcaaatgaaggaagaggaatgctcttctgaccatctgtccagagagacacaaccaatctctgttctccagagagacagagccaataggatgaatatatagatatatgagaggggatttattagaagaattggctcatgcaattatggaggctgaggagtcccatgacagactgtctgcaagctggagaacctgggatgctggtagtagtgtgactagtccaaatccaaaagcctgagaacccagggggccactggcataaatcctacagtccataggccagagatcccagagttcttgtgtctaagggcaagagaaaaagagtgtatcccagctccaggcaagagaaagaccaagttgcttttcctaggtttctgttctatccaggcctctagcagattggatgcccacactgaagatggatcttccccatgtattccactaagactcacaagccaatgtcctctagaaacaccctcataaacacacccaaaaataatgctttaccagttctctaggtattccttaattccgtcaagttgacgcctaaaattaactatcacaccatccatgaaggaaagatgttttgtcatctactataattatttgaacaatgtttcagatccatgggacagaatgaaaaagatctagaataaatctgatgtctttgtttctgttcttgttaactagggttttgtagtgcaggggaagataagcagcctccttcagtgctagtaccagctccctctccctgaaccacaagaccacccagtcgagggacttagccatctatgtctgtgctgcagggaacctacatgcccctgaaagcacctaaatgcaccaccccctccaccctgcattgggacctccactcaggggttagtaaaccatcttcatcacctcctctgaccaaaagaatattgtaaatgaatgtaacaaatcagagaaaatcttttctaaaagacttttagaaagctttttgttcactgtattatcagataaggaattcagagtcatgagaaccctgatcatgagctgtctgaggtgattaggaccagggaccctgagtgttctttcgtcaagacccactcatctaagaggggctgtctcaatgattggagcggcttctcccacttgtgccattaattgctggtatgcctcagtttttgcatctgtaaaaattctcccacgagaacctgagagtaggcgtgtgatactcacatatttttctcctagtttttactttttatagtctaactagctaactccagtaagaaatcccatgatggtagttgccagatagggttgatatcccaagggagcacagtaaaatttctcagactgcccagaaggggttctgcttccacaaaaaagcagccgtctgcccaccccacccgtatttgcccacttgcaagttcttttatatacatcgctttatttggtcttcaatgttcaataatttgattaactgtggaagttggaactgattgaatgataaatacaagatactaaagttctgattgcataggtcccagaggatcacaaaaaagatctaaagtggcaagatctatctatggccacaccaccccaaatgtgcccaatctcatctaaaatggcaagatccattcagcattgcagcactggaatccccagtcagcattgcagttgcaggcccagtgagcccaggcaagaggcggaaaacatttactcttgagaccctaattagtgaactcatagatagctgcagctggcctgagactgggagagaagacagcccaatcgtctggagcttcctatacagactagagagtggtggcacatgcctgtagtcccagctactcggaaagctgtggtgggagcatcacttgagcccaggaggttgaggttgcataattgcgccactgcactccaacctgggtgacagagtgagaccctgtctcaaaagaaaaaaaaagagaggagaagggggtaaattgtaaaataatagcatatttgccaatttcctgtgaatttgtccagaaaatagtaggtagtgcagaaatttaacaccacgcaaacaagaaaagtagaccacctatggaagaaactcaacatgctgtactttaagaagtcctccggagttaagaacggctgtggcaaaatgcccactgttagcaccatttccaagtggaaataataaatgggaagggagagttaagaccaccactccctatacggcaagtcagcttttaatttagtcttttattctccttcttgttttacagggggaaaagtttacataaagctgaactatacagaagccttatctaagattggatgacacaaattaaatagggagagaaaattaatgcaaatgaaactagtagttctctgtattgtgagttttcatttttgctctgttgcctcttctataaaatgcagactaattcctgacctttcctccctcaaagaagaatgtgtgcatgaggaaaaaatcagatgccaatgaaaagctgtcagatgtgcaacacagaatgttcccaaatgaattttatgttgattgttctgagtcttctttcacaaagtcattaacagaagctcacaaaagcccttgccaccagtattgtagagctccttgacacagccaaaatcaggtattctttttttaaaaaagaaagtcttcagcaaattacagtataattagatatcaaaagtctggtttcaattttctctagactatctgaatgttattgttgttgtcattatttttcatcatttctcaaagtattaaaatacaatttggtcaaacaataatataaccaatacctgtattatcataacccagagataattttctgatattggcttcaagacagaggagggaaagaaaaaaaggaaagaaggaaggaagaaaaaaaaaaggaaaaaagaggagtaaggggaagggaaagagaaggaaagacgggaaggaaagagagagaaagagagagagaaaggaaagacaataaaagcttatagagaaaactgaagtcacagcattagcttggcctgtcttttccccacccatctcattctcctatccaaattatgtctttaaaaaacaatgtatcagctccctttcctcttcatgtttattcccaaataaattacagttccaacaacatcttttttcgttaaatattatggtccaagttttattctctgaagcaaaagacaaaaagtatcgaagagctttccctaagggagacatcataaacagcccacctgacatcccatttcctgttctgaagcagctacggcaccagtgcagctgatactcaaggttcagatcagaagaggaggcttctcaccctgcagcagggacctgtgagcatggcatgccctggcttcctgtgggcacttgtgatctccacctgtcttggtaaggaaggcgcatgtattcaccttaactagtattcaatagaacagagaagtgggaagaaagattaatagtgcaagaatctaatctcttcactgggcccagctattaggggcaagaaagctgatggattttgtcagaggtttggatcaagaggaagaaaggcgggtggcaatgggaacaggcttgtgagtctgtttctgtctctcacatggtatcccagtgaagtcctttctctcctctttcccacagaatttagcatggctcagacagtcactcagtctcaaccagagatgtctgtgcaggaggcagagaccgtgaccctgagctgcacatatgacaccagtgagagtgattattatttattctggtacaagcagcctcccagcaggcagatgattctcgttattcgccaagaagcttataagcaacagaatgcaacagagaatcgtttctctgtgaacttccagaaagcagccaaatccttcagtctcaagatctcagactcacagctgggggatgccgcgatgtatttctgtgcttataggagcgcacagtgagacaagcaacagggagaggcttacagaaacctcagacctcagcatctgtgcaaaggtcagggggaagtgttcagggttataggaacataaagaggaaataattgtcttccctaaagaaaaaaaaatgtatctgactataggaaacacagaggggatgtctataagctgtaatttttgaaatagtaataaaataatgaatccacacatgccttatagattttcaaagtaccttcacatgttaatccattaaacctgcataagcctgtgtgttacataggtcagatcagatattctaaggatcactgctatccagagaatcttagagcttgacctaaagctatattcttttagaattatatatttttgctttattattttaattactatctatctgtacatcccatgatcatatcaaagtcaatatatccaaaactgaatttcttaccatctccacaaacctttattttttcttcatttttttctcctcagccttgctcaagattcaggaacacaataaaagtttgctattgctgggtttccagtttggggaatttcttcaccctcgactttccagcctgggctatcagatttttatgcataccttattacattctaattataaaatggtgcaaaaaaaaacactacatcatgtcagtctcactgtttcccctctatccgtcattctttctgactttaacctggcttaatcctgtatttcttaacgttctttaaagcatcatttgtcttgacataagaaagtaaggaaagaaagcaaacgactgtcaagtaggatttcatgtactgctagtactcaccagcaaacgctaaaaaaaaaaaaaaaagaggaagttaacttctggtaatgctataattgcttctggtaaggcaacctagcaggtggtgacaattttgataaacctggtccaacagggagaccaagcagctgccatggtccaagtctccacccctatgtcttctgagaattgggagatgcctggaccgtgagaggattctcccttatgctaagggaaaaattaaaataaatgaaaaaaataatgccaacatttctttttatgcccacaattcccccaatacatctccttcactattaagccccttgtggagcattttattccatctgctcactgtgggtggcgagaggaagtttggaatgacaaacagccgaaataattaagtccaataagcaggctccagagcttaggctgggggtctgtttggaatgagtggtgagagtgactggatgtggaagagggtaaggggaggccaagaccaaactgcagaatcataattcagattgccgagtcatttcccaaacacagcagcttcagtaacgccacaccctagcccagcttagcacccaggcttctgcttgtctgaaaaagtggggtaggcaccaatcaaaatgaaaacctttctctcacacgaggaagacaccttcaggctattcaggttttgtcctcccttttacccctgaggcccatgagtcacccagacttagattcgggctagttaccaagtttcatatcaaagctcacttctttctatccttgcttctagtgctttcacgcagctcctctcatttgaattaataaataatcattaatctactctctctaccttcgattgtgtcctcttttaatatggtttagctgtgtccccactcatatctcaacttgaattgtatctcccagaattcccacatgttgtgggagggaaccagggggaggtaatggaaacatgggggctggtctttcccatgctattctcatgatagtgaattaagtctcacaagatctgataggtttattgtgggtttctgcttttgcttcttcctcatttttctcttgccgccgccatgtaagaaatgcctttcacctcccaccatgattctgaggcctccccagccatgtgtaactctaagtccaattaaacctctttttcttcccagtctcaggtatgtctttattggcagggtgaaaacagactaaaatacacccttcaaacattgcttcacatagctgtcccagtgagcatcctataataaaaatcagatcatgtacacacacctctgcctcaataaagcctcatttcccacagaaaggcccagtgattatttagaatataagtccatcaaagcggaggccaccactgtatctccagcacttaccatgcctaacagggtaaatggtcagggtcatctactgatggattaattagtctgtaccctgcttagcaactcagcctcatttgttgccatattcccatccccccaaactgtacacgcccatccgctcagcaaatgaaattgtttcctgcatctatgcctttgccagcattgtcccctcagcatggaatgcccatccccaattaaccacttgcctattatttgaaaggttcgcaaacctcccctcttctctgaatccttgtcctgacccttttgcactggtagaactgatcactttctcctttatctcctaactgaaaccctaagcatatttctaacgtggcaaatccaacaccttatggtgtttacaggtatttttcactgtctccccactaaaatgcaaactgttagttaccaaggacacagttttacccatttcaatagcaactgtgcctccaacaatctttaattcacagaaatgattcttaagttttttgaatgaaggtaattaattgatgggcattttcctcattaaacattatagagtaaaaatggataaattttctattttgttatctcctccatagttgtgttaactcagaattctgagctaactcataggactgtaaggcatgtcaaaaattaatagtaacaacagtatcatgctgataataaaaatattagtagtagctaacaattattgagtatatatatatatatatatatgcgccccatattctgagaggtgcatgacatgctttatttcatttagtagtcccaacaaatccatgctgtagctactattgatatcccagttttatatgaagaattaatataggttcaaagaggccaaaatgcctagaatcacacaatgtacgactccctgaccactggcctttttcccttcccaaagggtggcaaactgctatagcatctcagtcttattaatgtaatagacacatagaacataagaaagaaattcatgaaaacagtgctgcaccatacatgcacttgtagtcctcactttttctagagtagtaattgcaagatgagacttatttcaagtatccttattaatagaagttaaatgtaaaaataacactattaccattattgtttacataggaaatttttgcctttttaacattagtttataattatttgacctgggactatacaatattttaaacttcttcagtgcatttttcaatagcgtttaagtttaaaatgcagtctttggcaggggcattaataaatgtttcaaatgtcattttgtataactctttaaagaatacaagagtttagaagaaatttctaacctttccaagttatctgaatttccaagttatcataggaagatccttcctttgtaacttttaaaacttttttgtatatggttgggcgtttctatgaatgatgcttttcaattttttttgcttcagtgaaaaattatatattgtgaaagctttcccacataaacaagcagtttttctatagcatgagtttcccatggctacaagatattgtatttttgaaatacacctcattttacccaataacttgaggttttttttgttttttttttttgtttttttttttttcagatggagtctcactctgtcacccaggctggagcacagtggtgcaatctcagctcactgcaacctcccacagccaggttcaggtgattctccttcctcagcctcccaagtagcagggattacaggtgcgcaccaccatgcacagctaatttttgtatttttagtgggggtttcctcatgttggccaggctggtctcagactgctgacctcaagtgatccgcccacctcggcctcctaaagtgctgggtttgcaggcgtgagcctctgtgcccggcctaacttgagttattgatcgagtaaatcaatgaatacagtaagcatgataagtacattgtttccaaattggagctataataagtaaaactgtaattttaaaaagatacttgtacataaaatagtatgcaagtaagagagagcccagatcaaagtaaccgaagcaaaacaaaacaaaacaaaaatctgttggctaataaaactgaaaaatctgggttaactactttaggaaggactgaccaaatgctcaaataatgtcaccacagcgtgtctctatcgtttggctcttgtttatattggctttactctgaagaaagctcaggcccacatgatggcaaagatggccgccaggagcctcagacttgtgtcctactgtgttagtttcctcctgctgctgtaacaaattatcacaaacatggtggcttgaacaatattactttattatcctacagtttgggagctcataagtctcactgcactaacacaaaggtgttggcagggctgtgttccttctataggctctaggggagactgagtgaaatcctgagcatccctggcttctagaggctgctgcgtgccttggctcatggccctcttccatcttcaaaactagaaatcgcagcactgtgacctctaccaccattgtctcatctcctgtcaccctcatggccctcctgagccttgatccttgagattacattgagatcccccacatattccagaataatcttcccatcttaagattcttggtgaatcccattttctaaatcacattttcaaggacatttgccacataaagtaacatattcacaggttctgaggataggtggtggacattcctatagactgaatgtttgcgtcctctcaaaatttgtatgttgaagtcctaatccccaaggtcatggtattaagtggtaggacctctgaaaggtgattaggtcatgagggtggagttctcatgagtgagattagtgcttttataaaagaggccccagagagctgccttgctctttccaccgtgtgagagcacagcaagaaggtaccatctatgaaccaggaaatggccctcaccagacactgagtctgctgctatcttgatcttagatttcccagccttaattgtcagaaataaatgttggttgttaaagccacccagtctatggcatttggagtataactgccccagtggatgagagagacatctttggaaagctacttctctccttaccatacctgccaaattaacaactccagcagaagaaacaggcttcttttgtgatatttccagaaaatatcctggactgactttgcttagactgatttcttcagatttgggaaacaggcagaggtggttcctcaaggcaaagccaagatgctactagaagaggaatgaataaggatacgtaaaaataacagatgaccccaatgctattaatttatttcaaactcctttttgccatcagaaagcagtaataagctcacatatcaattccaataaaataattttttaaatcgcccaaacttacatttcaacatagcaagcaaaaagcaatgaataaaattgcttcaccaaaatatagaagctctgttgaccagaaattcagcatagacagttgttcaagataatttcaatgtgttcagcagataaagggacaaataaggactctttaagggcaaatttagctgagggatgtgttaaattgtatatttggcagactgaaactaaagaataaaaaaagagacagcttgatataactttctatgccaaacccaatgttatactctaaatctaaaactccagaaaaagtttgaaagcaacaaatatgaagtcaggaaaatcattctaaattaccaactatttaggtataatcttgagcattttagctgtagatgaaagtcctatttattcatatagattctcatatgctatgaataatagttcatttggatgtctctttaaatcaaggagggataaagacaggaaggaagaaagctggcaggcaataagagccaaagtaaagatattattttgattaaaatatactcattgttgaggtatccacaaatatttgagaacacattgaagaagtaagacaggtcagaaaatataagtatatgatcagcacttagtgaaaacagttaaagagaaagaaagagcaaaagaaaaattgcttaaagcaacatagatattcaaagataaggaattaaagctgagataaatgtgacagaaatggaaaggaaggaaaatgaagttatgaaacattggcaaaaatagctaaagaatgcagaataaaatgtcctagaaaacatttatcaaagggttatattttattagcattcagtagtcacaaggcaagaaatatgatagctataaataaatacatgagaatgtttaaggttttatgatgatcatggctttactgttcaatatatattaaataaaccacaagttatctataacacagttctgaataaaatttaggaaacgtagagtcaggtacctcaatatagaaaaatacagaaataattaaccataatgcagacaaagtgacacccagttgtagagagcattacaagcattgaaatattcagaatattatttgattaaaaaaaagctcatgtaaagataccctaagcaataccaaagatacacacacacaaacacacacacacacacacacacacgacacatacatgctatatataggaaggaagaaagcttctttattggggacacagtttacatattacctcttgtttctatgagatgctataagaaaaaatctcttaagatttactacatgggtaatatatttatatagtgtctgtgtgtatgtatagcaaactcttatatatatatatggatatcttacagtcttatagacttatatgagagtgacagtaaaagagagagagagagaggagtgtatacctatttcctctcaaaaaggccatattctggcaactcccttattccccattccctactatgcagtttgatctagccttagatttcccaggaggttctcttccagaaaagtgcctgtagctataaaataatcttcatcttggctgtttcaatgcaggattcctattgagccaataccttaccattttctttccttcgtggaactgtgctttgtcataatgcaataagttttctatgaagtatatcataaacaacagtcctacagaattcatcattggacataatatagcttctttattggggacacagtttacatattacctcatgttctatgagatgctataagaaaaatttctcttaagatttcctacatggataatttgtacctacacttgtagtttgtttttatcatatggatgaggtaattatcacaggactgattgttttccttctttacattgactgctaataagttcagagccaatgttagcttaactccaactatagaggctgattgcatatattttaattccaaatctaattcaaggtttatgttcctgcccttatttttttcttcttgatttttgtatttctttgctgttgtttttgtagatttttctgtgccttatacttttttcaaagataattaaaacagtgtgtgaattcagtggggtggatgaatgaatgaggcagagaaaaaggaaattgacatggtaggataacaaactcacataatatgtagatacatataaaaagacacacaaagaaaaaaatttctctaatatatctaatcttctttatgaatgatcccatctaccaaatagtcaagaaacttaaattttgtaaattgcaattaacaatgtctcattttattcaggtttaaagagttcctttcactttaaatattcagttcatttaagttcaattccatgttagggctgatgtaaattctttcttagatgactcagtctctttaggtgatatgtttggaattcaaccaccttacccttttctttccgtgatgaaatttaggtgataaggtgagacagttgagtgtcacctgaggcaaaaaaaaaaaaaaaaaaaaaataggcttaaatccatgcattgccttctggatcttttggtctgagcagctgagcagccaatctactctgttccctgtgtaggtacctagttatatatggattttcctacctggacttttgggattatgtgttgacaccactgctgaagccaattgtttcagccgcttgactccatctcaaagaccctcatcatgggcacttctttgtacttagcccaggactttgccaggccactagctctctcaattctctgcatctacttcctggacccctggggacttctgtattccctgcacctgtaaacagaccatggggattctagaaagtagcctctgactcatgtagccaagccttgatttttctccagcgccatcttcccacgacttaagtaagacttcccccagagacatgcagcctgcccctagaacactgtgagaggtgctctactacccagtactcttgtgctgttcccatacttatctaaatgcttctagcctttcctaacccaatcagtgtccgcccatagcagaccaggggaaagaccagagtcctgacacctaagttccttgttctgcctccatttttctttaccctctaggacccaaaaaactgacctccctctctgtcctgcacctttctgtcaaactgatgtaaaactctatgatcaagtccagctggtcttacatataatatggtaaagaatacaataaataattaagaaaaagtgttacacctgaaaaaaaccttacttttaaggcagttctcttgttaagtaatcaaagatccaaatttagatgtcagagctgaatattaatgctttctatttccattcctctcagaataatctaatctctccccactcaagacagatagattcctcagaagaatatagataaggttatgtatctgaaaatataaaggagaaaagaatattaatacatttcaaaaatataatctcaattacaagtagagggaggaaatattttatatcaccaagggcactcattggaaaatcaccatagatattttcaaagaaaataaaagacttccaaaatcaaaagaaattaagaaaatgaagaaaagacaagccacagactgggagaaaatatttgcaaaatgcatatgtattttttaagtggtatccaaaatgtgcaaagtactcttaaaactcaacaataagccaggcatggtggctcacgcctgtaatcctagcactttggtaggccaaggtaggcaaatcacctgagatcaggagtttgagaccagcctggccaacatggcgaaaccctgtctgtactaaaaatagaaaaattatccaggcatggtggcgggagcctgtaatcccagctacttgggaggctgaggcaggagaatcacttgaacctgggaggtggaggttgcagtgagccgagattgagccattgcactccagcctaggcaacagagcaagactccgtctcaaaaaataaataaataaaataaaataaaacaataagaacatttaaaacccaatgaaaaaaatgggcaaatatctgaacagacacctcagatctgaactatctgaactatctgaacagactataaacaaagtatatagatggtaaagaagcacatgaaaagatgcttaacatcaaatattactagggacttgcacattaaaacagtgaaatatcactacctgcctatcagaatgactaaaatccaaaacactgaaaccatcaaattttgtgagaatatggagcaacaggaacccttattcattgctggtaggaatgccactttggaagatagtttggcagttactcataaaactaaacattctcttaccatatgattcagcaatcatgctccttagttttaactcaagtgagttgaaaacttctgtccccataaaaatctgcatgaaaatgtttgaagtacctttatttataattgctaaatcttgaaatcaaccaagatgtccttcaacaggtgaatctatcgacaaagtatggtacatccatacaatgaaatattattcaatgataaaaagacatgaccaggccgggcgcagtggctcatgtctgtaatcccagcacttcaggaggccgaggcaggcagatcacctgcagtcaggagttcgagatcaccctgggcaatacggtgaaactctgtctctaccaaaaatacaaaattagctgggtgtggtggcacatgcctgtaatcctagctactcaggaggctgaggcaggagaatcgcttgaacgaggatgtggtgagccgagatcatgccattgcactccagcctgggcaacaagagtaaatctccatctcaccaaaaaaaaaaaaaaagacatgaccacaaaaagacgtggaggaactgtaactgtatattgctaagtgaaagaaaccaatctgaaaagactatatactgtatcattccaactatataacattctgaacaaaaacaaaactatggggagtgtacactgatcaaagtctaatgtaaattatgggctttagttaataacaatatattaatattggcttatcaattgtaacacaagtatgacattaatgtaagatgtcaataataggggaaatggggaggatgagggttgagggggtgtataagagctctgtatttccactcagtagtaatacatcccatgctagtcttaatcttaaaaaggaaaatatattctagttgctgtatttcacaatgctatgatcattccttgtcttacttagttcattaaagctgccataacaatcatagactaggtagcttacgaattacagaaatttattctcagagtctggaggctgggaagccccaggtgaagacaccaatggatttggtatctggtaaaggcccatttcctggctcataggtgacattttctcatcatgtcctcacatagcggaaggacaaggcagctctctggagcctcatttataaaggcaccaatctcattcatgagggctttgccctcatgacatagtcaccgcccaatggcaccacctcctaatatcatcactttggcaattaggtttcaacatatgaattccaagggggaagacaaacattaagattgcagcagtcctttcttctctatcaaatccttgcttatccatctagatcctcagcaaatacaacttagactatatagcccataatgatctactttgctaatcaactcacatacaacttcttgactctgccatatgggggactttttaaaacattgacttatatttctacttaatcgtgtacaggtttatatgtgtcaatattcagaactatgatttacacacatagaaacatataaattaaaccaccatcatcactcccaatcatacacacacatgttcatatacagcatccaataaagcatcctattcaaatttggtaataaataaatatttacttcttgaaagatcaactggctaaagaaaataatgtattccgattcatccactttcccaaaggagggttctacacaacaatcactagtgtgtgcctttggtcacacttttaagtaacagtaagcaatgaaaaaacaaatagaaaatgccaggctgctctcatttgcactcctgcttcatgtaaatgctttcaattattcatctagcaaaccacacacacattgcaaatgcctaaaatttccttttgccaattagaggtaaacgcagtccccaatttctatccatagaagaattaaagcaattctatttgcatccaatgtaaccaaaagttgcctttctcaaaagatacctatgtggcctcaataatccagacaaaaggctcactctctcagtgtggctgctgtacttcttgcctcttgtctgtataatctactgaaattaggtaccacagcactttctctccaacaaatccatggaaagtaggaaaacatgttgaactactccaggactcccaaattcaggttgaaattttctttcaacatagaagtagaaacttctggtgaaagatggtaatagctcagcaggaagtcagcacaaacctctaaaggcaaagcaggaggccggagtcctcccctctctccctccctcataaggagccctgctctggagacttccatggggacaagagagaagaaatcgttttgctgctcagatcctaggattgagtgacataggaatggagggcccaaaaatttgagtaaaattcctagacttggtttctgaaactatcctgactctaagattaagcaacttctcttcttaaatttcttcttataaatctctccttggggaacgttcctgggtggataaaacctatggaagaggggaaacagagttgtggagattaaagttaaaataaaaaaaagtctttttgttttgttttgtttaatcctattttctcattatttatctgaggtaatcaagatccagagaagtccctcccttgccctacatgggatagcagggggttccgcaaggattctgtcctcgcactgactcccactcccagtctgtgtctgcttttcataccaaacactaaatatgttattaaacaggagaataaaagttgtgaatatcaccctggcctagacagaaacacacaatatatacaataccatactataacagatattctactagatatgagagagccaatacaggctaatgaagaaacaagaggaaaagatgaaaaaaatgacatctagaggtattcgtaaaataaaaatctaataggtaagtaggcatgagttaatctgatctttcctctaccccaaattatttttctgccccaccgtctaggctagaatgtctacttcctgcttctgtgcctatagtcatcttagtctttgtctaagaacttggtcaaaccagaacctttaggtattgtgactccatcagttaatccctatggatattttgcttcttagtaacattctgggataacatttgtagactgctttggttattaacaaaaccaacaacatggagctttaatgcactctctaacttgagttctttgtcttgtctcttttacagctgcgttttctctgtgacaccaggaatcagcatttccattcaaatacagcaaactttaaaccgctttttgacaggaggaaacactttctgcctaatgaaggggatgaagcaggtaacccagagagtatctgccacacaggcctcctctacagtagctcagaattgcactgtttgattatttcttacacgtggcatctgcaaattcagaaaggtgagtgatgtcagatctaaaggtcccttcttccatcttggttcattcaaattcaggtctaagaggaaacattgaagaagctatctgaatttcaacaggactgattactttccaccaaaggctgtaggagacacagatttaaagagtgactagggggttaaacataaacatatattgacagtaattcctgcattgtcatcaaagtgtgctcatgtttgtaggccaactcttagtggtattcagacattggaaaactgtaaaaccttcatgcatttttaagatgacttctaaaatattttattattagtttaaatgtttaaatagctacaaaggttgtaaattccactgtaatataaacattgacattttcaaataaaactcagaatagcttttaaacatatccagtgaaaccttaataccaaagtgatttgatacccatcaacacccagttaaaattcacaacaagctcttcattgacaattgaagaccttatattgctcttttctttccttggaatcatatttccattcaacttctcctgcagaacttaattttagtatatttttgtttaaaggcttttgttgatcacccaaaatgcctgcaacaaaatcacgtaaaaaattgaaattgcttttaaattttctctgaccatactgctctaattgctaaaaattatctttctagattgagttataaatataattattgttgatgtaccttttattaaaacaacaaaaatatatttcaattttagttttaaacttacaggcgaaaattttttggaaatgcatttcttaagaaaatcactggggtcggcccggcgcagtggctcatgcctgtaatcccagcactttgggaggccaaggcgggtggatcacgaggtcgggcgattgagaccatcctggctaacacggtgaaaccccgtctctactaaaaatacaaaaaattagtcgagcgtggttgcacgcgcctgtattcccagctactcgggaagctgaggcaggagaacggcgtgaacctgggaggcggagcttgcagtgagccatgatcgcgccactgcactctggcctgggcgacagagcgagacactgtctcaaaaaaaaaaaaaaaaaagaaagtgactggggtcatatttacggttaattaaaggaggcttccttgacaccaataaattgtccctttgtttaatgttccaggggtgtttaaactgcagggcaatgctgcaaaaggagattccgtcttgaataaggttggggaagagcaattatgaaatttgagacgggaaacaagaaccacagtcaagctcttgaacagatcacttttaggaaaggttacatacagaagttgaagatctggaaattgattcccttaaaatacataactgttgcctagtttgaaaaatcactgcattagattgctctccacattactgatttcattctcagccagacttcatgaagtggtgaggtttgaggaaaatcagcaagagattttaatgacagagccttgagtttcagtaaacctgataaatttcctaaaacttatttgacatttctggcttgaaagaatagctcctgatgaattagaaaattatgggagattgagttcttgcatgacacaaagtcatttaaacatatatctttatcttgggaaagacagtttaaatgtcatggccatttattaataatattgtgaaaaaaagttatcccaatcctggaaaaaagaaaaatgatgattgctagtctttttttttctctatctgcaagagcattttcaagtaagcaattatctggcattcttggggatcgtaactttgttgtcagagcatatttacctagcaatccataactgagaaaaggctcacatagtttacattcctgtgggttggaggttaacctacagaaatggaagagttttgcgttcatagcctggaaaaaaaaattaaccccagattatcgtgtcaaccctaatagcattttattttgctatctatatagttgtatctttttcctgtaaacatttgtggaattagctttttttagttaatgattaagaatagtaacaaaatgtgaacccaggctcactccctatttgtattagtattttgttttttagcacatttaaggccatcctggcactaaatcagaaaactacttcctgatacctaaactataaaatcctggtttcatatacatctgaattaggcaaaaacatagctggctattatttatttaatttgatgtcttaacatgtaaagattttcttttcagaagaaatctaatggaccagatgtcctgaaacactcttaattatttttcagtagtacgaacatagccatgaaggcaaaggaaggtagatgatcaattcatgttaagagtttcaaattccatggactaatttatatctttctccacagccacctggcacattctgcctttgaacagatgctttacaaaaacataatctgtggacatggagatcttgcataaagcaaattctctctgatccacagcttcactgaggggtttcagttttctaggccagagtgactgctggagatgaagagattctatcaaacgtcagtgtaaaattgtctcttacttaaaatgccctcattgatcttatcctgatacccttactacagaagtttatcatgactcatctaggagataccagagagttcactagccaattcaagagcatgacttctcaaaattctccatgttttcctctttccttcctagctaatcccactttctcctgcctttgaaggctatagcttctctgccaatttcttgaattatggggttcctaagccctcttctatgttatccacagattctaggcaatcttactggctcctgagcctcgaataccatttaactgctctagactgacaaacctgtatctctagccaagactctccttggcacagacacactattgggctccctatctcatcaccccataggtccaccttctctgtgtccccatcctagtaaacgaagccatcagtgcctccaacatgttctcttcagtctagccagagttattatttaaaaatacaagtgcaatctgtttgctctcttgcttaaaactaatcagtgacttccagtttcccaaaggatggaatcccaaatcattactaaggctcacaaagcctttctttctctagcttattgctctggtttcatctttcatctttattcttcacccatcttgcactctgtgcttaatatctcctgtttgcttccaggtcctctctccatccttccacaccctgctttgtgccccaggtgactgacctatagggattataccaataagctatcttgtcttttggtttccagtaggtttttgcccaagggcagtacccacagagaacagaaaaaatgaggaaagtaaggtcaggctatatattcccccaacttcctcccttcccacatactgacattaacccacaatcagctccttacggtggcctctccaaatagcctgtctttctccaggttttggtaatcactccctcctttccattcaaggcctggagtgatgctagtcccaggttgtagcactatctcttatatgttccctgctcactgcttgtatttttataactagtgtcatgtttctcaaattacacaatttcagtatgccataagtttcctaccagaacccagattgatactgtctgctttcaaatcctaaaaggtgtcaactatggcttaaatgttccttatttcgggaggccttttctagccgtcttgacttggatgtaaccgcctgctaaacctcctacagcaccctgtccatctcctgacagaacatccttcacacttagcagcaatcattgaatgagtattagtgtcgccttctctaaacaacaaacaaactgtgtcagaaaaatataaagcaaaatttgtaggaaatataaaaataacttgataacatattcattatgggacaccttaatatctttttctcagagagagaaagagagagaggatgatggaaaaaactttatattaaacatatagctacagaatatttacaaaaaaatgagcatataatatgactcaaaaaatgggaatcatataagccacattgtctgaacctaatgcaataaagctagaaactaataattaaaagatagcaaataaatgagtagaaagagaaccacttataatattctaaaacattttcaggtcaaagaactaagagttaaaattacacgtcactaaaaatgaaccctaataatggtactacataaaaaaactatatatttgttcaaagcaatattcacaagaaaatgcatccatctattaataaaaagtaaaacaaaggagccaaatctggcaattcaagaaataaaaaagaaatgagcaaaataagccaaaacagagaaggggaaagtttaatgataaaagcaggaattaatttaaatgcaaagcaataattagaatgtacaaataaaggcaatatttctaggaaaactgataataaaaaagaaaacacaaatgtgcaatgttaagaacgcgaaaggtgctataaccccacaaaaaaaagcaatttttcaaatcactggttaatgccttgtatacatagatcttgatgaaattggtggtgtttagaaatatataactttttaatttaaacttctctactttctaaaaatttatactattttacaattccaaagtcaacatcaaattgtaaagaaaaaaatcctgaattctgcctcttcttccttcttcacatacgcagcaaataaatgctacacatataccaactactatgtctcgactctcctatgttttcatcattaaagaaaaaaacatattgcattcctactatatgccaatcattgcactacacactgggaaatcaaaaatgactatgagaaattccctgctttcaaggagttcatagtctagtgcgagaaacagacagatgtgcacactgattataatactatgtggtacctgtgataatgcataataatgatagatgtctttactgagtttctgctaagtgtcaaacaccttccattcagctgagatcttgtcctttcctccaactcttacccgggcattttcacataatagctcgttatcatctcaatttcaaaacactttttgtactcagatgcttctccaatttcccagtttctgtaaatggcaccacaacatttccttattcaggcttgaaccttttgagtttatagtcaggtaccaatgcttgtcagtttttcctttgaagtgctattgaatgtatattttgtttagaattcccatgactaccaccttattcaagtccttagattgttcccaccaagttgaaaggggtgtcctccttcctcttcattattgaagtctctttcttgctcttctcccctatcctaccagctcccaaccaccctctgaccctctgcaccactgccacacctttctttttaagatatcttttcatcatatccctccactattcacaatcttacaacagtttctattttctcatgaatataagccctttgaagtagctttcagtgacttccattatctcctcctcatttcaccaatttatcctcattcccagacactattacccagactctgttttctctgttagctggaccattcttcacactttctcaaagacatgtcatcctcactcctacctctctatatttcctgaaatagcctttagtgcgtgctctctctctctctatctaaacattatgtgttttttaggccttagctcctccaaagagattgtactaaattcccatagcctttcataatttccctctcttttgacctcacgtacagcatacacaaaaaaaatgcacccaatgctatgctactgtacaaagcagtgtactgctttgcactgttaactttaactctatgtgcattattttaatctttctaactatcttacaactccattaaaaccaagactagatactgtggaattatttaatacccccacccacctcatcatttatcacattacttgatacttggtgagtacttgctgggtacatttgaatgtaatgtcttttatttcttaatgtctttcattttctcaagtgttgttaaaggcaaaaagcaatgttggatggttttatcagttatgcagagttcatgcaggaaaagagatttcagtgggaccttgcttaagacaatagagaatttagtttaggatttaacaggtctagaaattaatgtagaaagctgtcccacaaagatctattatccagaatatgtaaggaacctaaacaattgaacaagcaaaaaacaaataactccatttaaaaatgggcaaaagacctgaacagacatttctcaaaagaatacacgcaagcggccaaccaacatatgaaaaaatgctccacatcactaatcaacagagaactgcaaatcaaaaccacgatgagatatcatctcacaccagtcagaatggctactattaaaaagtcaaaaaacaacagatgctttcaaggctgtggaaagaagggaaaacttacacactgttgatgggaaggtaaattagttcagccactgtgaaaagtagtttggagatctcgcaaagaacttaaaacacaactactattcaacccagcaatcccattatggggtagatatccaaaagaaatcaaatagttctacccccaaaagacacatatactcccatgtttattgcagcactatctacaatagcaaagaaatggaatcaacttaggtgcccagcgatggtgaattggattttaaaaatgtggtacatgtacaccatgtcatactatgtagtcataaaaaagaacaaaaccatgtcctttgcagcagagtgaatgcagctggaggccattatcctaagcaaattaatgcagggacagaaaaacaaataccctgtgttctcacttagaagtgggagctaaatattgggtaaacatggtcataaacatggcaacaatagaaactggggacaactagaggaagaaggaagggagtggagcaagggctgagaaactaactttcaggcgctatggtcgctgtattagtcccttttcatgctgctgataaaaacatgccaagactgggtaatttataaagaaaaagaggtttagtagactaacagttccaagtggctgggaaggcttcacaatcatggcagaaggcaaaagacacatcttaaatggtggcaggcaagagagaaatgagagccaagggaaagtggaagcctcttataaaaccatcaaatctcataagacttattcactaccaggagaacagtatgggggaagctgcccctatgattcaattatctcttactgggtctctcccacaacacatgggaattataggagctacaattcaagatatttgggtggggacacagccaaaccatatcactcactatctgggtgatgggatcatttgtgccccaattgtcagcatcatgcaatatacccagataacaaacctgcacttttttaccccctgaatctaaaataaaagttgaagggaaaaaaagaaagctgttccacattgattgcagtgagtataatgggcaaaaattactgcccccaacccgcagcccccaaatcctaacagaaatctgttacatacacacagacaagcatggattgagcattagctcagtagacaggtcggttgaatcccactttccagctgcatgatcataaacttattgtttaacctctgtaagcctgtttattcttctgtaaaatatagatcttgtgagaattaaatgagattatgcattcacttagcatagtgcctggcatacagtacagctcaatacatgttagttattattatcatcttttgtcctttcttccacaactttgtataagaagtgttggaggaactgaagaaaatgtgatgtgttcaacatggtacagaaaaggtacaccatgggcagatggtcaaggtgagtcatagactaacccagttcacaggagtagctactcatgttagaggagtcctaaagaaataaaagccttccttccctcccactctccctccatcaatggtccacagagttgagagaacacaactgtggtaggcatctaccattttgttcacttagaatggcaactcattcctggtaaaatataaattctaaccatgtgttatgaatggagactgctatcttacttatgaatgggctgatgaatccacccagaggtggatgcctgacccagctgaaccaatcatgttatgtatacaccactctagtcacaaattgcccccctggatgggaacctggctcagactgaagcaatcaaagccttacctcaatatttttaaatctgggatcagaaaggatcctcagtatttctttggtggctacactgtgagatgaatcccaaccaaaaaatgtttacaatcatgcctcctgctttgtggtggaatctggtctgaggaatgaaactaagacacgaatgaaaggaaaagtcttaaaggattaagttccctggcaccctggatgcctgaagtccagatacacttctgctcttgccaaggttattggagtcagtgcatttctcttcttgcctaagcacatttgagttacatttctgtcacttgtaacatcaatgagacgttaaagagttaattcactaggaaatttttaggaacaccttgctggcttacaagaagcatcaattctacgaattactttctcaggaatttctctaaatatcctgaagagggcactgtttccattcataacttctgtccaaacccacccccattcttttgtttttttttaatttttctttttatttcttttttttctttttcttttttttttatgaaagggagggactgagtaaattgcaggatgtgattctaattggttggaacatcttttgaaatcgtgtttctgtagagaaagaaaaactaccatatttggatagccctggccaactttcaaggctcctaaatctgagttttcagtgaactggacagaaaaaaaaaatgaagaagctactagcaatgattctgtggcttcaactagaccgtgagctgggggttcattgaaaagggagccatgggaggaaaggaattgtccatacaatgtttgggggtagagacaaggttcaatgcgactcatttgggttccctcgggaggaacaggattattggggtaaccagtgaatgcttccttctgaaatgttctctttggacagggttaagtggagagctgaaagtggaacaaaaccctctgttcctgagcatgcaggagggaaaaaactataccatctactgcaattattcaaccacttcagacagactgtattggtacaggcaggatcctgggaaaagtctggaatctctgtttgtgttgctatcaaatggagcagtgaagcaggagggacgattaatggcctcacttgataccaaagcccgtctcagcaccctccacatcacagctgccgtgcatgacctctctgccacctacttctgtgccgtggacacacagtgctcccctgacgccaccagtctgtacccaaacctgcagctggtgggcccactcctcctgcaggaactatgactgtgaggcttcgttcactgtctgtgcatttctttctgcaaggaaaattctgagatgggtgaaaaaagatgctgttttatcttcttaactgtggaatattttttaaaaggaaaatgtattcaggctgagggaagattcctaaccatgtatttcctgagaatatgaggtctcattctttactgcctcacagtcagaatttgttagtcttccattatggaataattttacatgtagtgcaactgtcacaaataattcctatgaaatatggaatcattatttgttttatatatgaatgtaacatatggcatttaccaatgaaagaaagaataaatgctttataaaagaatggtctatgtgaggttccttacctagtgtttcctgctaaaatactgactacagtagtcagataatatccgtgtgatctaagtacctgtttatctcaatgtgtggagagtctctgggaaatgtatcctttggctggatttactcgaaaactatctgagggtccttgccaaccagaagaatattatattttttcttgtattatttgccagtttcctcttctcctccctccatttttttttgtaattgttttgctacatggtagaatttatattaaactttatttgcccattgcagactagataaaatgaatttcactttcaggaaaattgtcttataagaaatccccaatttgaatgttatacaaaaataattgaaaataagttttcctgtcccactaatgagataatcagtaccttcagatatcaattgcatcatattttcatcccagacttctaggaaaataataaacttgattcagtcaggcttttaagtgacaatatttcagaaattaccattacaatgtaaaagctgaccttaacatttcaacatttgtaccttcctaagcaacagcacctttaaaaacatttaaaaactaaaaacacttatttctctaaattgcccctagagtctttacaagcgaatcagcttctgcagcaatttgttggcagattatgaaaagtcagccacagcagtgtacagaccaaaagctcctgctaccactcagagcctccagcagggactataataacttccgtatttagataaaataaaatttgacatgaaaaaccgactagttccatcatcctttgagtcaagcagaggtttcactctgacagagtaggctgaaaaaactttgaccttgtatttataaatactcacaacgtatcttaaatttcaagtttcttgatctgttaccaaagcaagtttccttgtcaatgactgattgtcgggaaatttttattttgcattgatgatcttatttgttgtgttgttacataatcagaaaacaggatgttacatcagattttctatatcctttctggagcatttaacagcatgtcttcacacactcatttccatgctgaaaacattttcaccaggaaactattcatgacggggaaaaaaatattgttcaatccaatctaattaactgaaggaacaatattgacttaagtccccaaatctcttccttcttagagagaactcttggattctgaagatgaacttttatatcttcttcagatcaagaatataaacaaaccctaaaacaaatgaatagaactgaggatttcattaatttgatctttagaacataaaaaactaagttctttccacttctccttcccaattttcctgactccttcccaacttatgagtatatagattttttgctttcttttcctagaatcacttactgtcactgaaaatatatcattaaaccttattctcgaagaaacaatacagacattcaaaattgaaccagttgactttaagggtgtgatggtgtagtaagaaaatactatcgaaggtgacaatctccaatacattagagcatgctaagccaaatatgttttcccccagtaggacctttaggaatgtctcaggtgactccaagcttccggcacttgctgtccatgaccagagcttctactaacaagaagttccataaaatacttggatccatcctaatcagatacaccagttgccaagtccacttaccacagagattaggaaaggagacatttttctcagttgtgctattcatgtcccagaaatggcatttaagacaaataattctttgagtatttcttccaccctgtctcatctgttttgatgtgaactagtctcttttttcattgcttttaacacagctggttattttttcttttaatagtgtgtctgcttcaaggtttatctagaagttgtttcttaatatcaaaaaagttaacattttttatttttactgaattatgaaatctaagtgtaaatatgaggtgcaccttctaggaatttatctaagactcagtatgcatgttcttccatctctcccagctacctggcctcccatcccctttcctgctggacttgttgatcctcggagactcaagtacatccttcacttagtctatgcactatataccttcttcaatgaggtccctgtgtcagggacatggttctcagtttccagctactttccatgagctccctcaagcaagcaaatatttttagaaggtatttttagaagacaacattttaaaagaccatagtgtcctttctactctactgtgtctgcaatatgttgcagtagaacatttcacaaagctagatcttctcagagctccagatgggaaccaggcaaaaagctctctttgcagcggacagtcaacctatcttgtggtttccattgtccgcattcctagctcagggttttagataggatttgtgattttttaaaactgccctgaaacctcaggctctgctcttgacatataaattatcaaaaagaaaaattaccaagtacctgtctcttgcaactcaaaaaaatgccttatttcaggatattttttcctcctaagactttttaagtccattttgaatacaaaatcaataatttgaccctttgatctcactggatcctttcacaatctccctttactggagcaataagattcatcctcaaaatttgtggcaagagatttacaggggaaaaaatgaattttaaagaaggaaattatcatatttgaaactgttagtccactccatttagactcagagattctaataacacaacagtgtgaacaccagatttggttatcagaaagaattcctgagtattcaaactcttctactgtgagctctatgcccttaggcaagtttcataatgtatttaagcctcacttttctcatcaaaaaaatatggaaaaaataataaccactttctaaagtttttatgacatttaaaatgagatggtgtatatgtaaagtaaacagcacacacaccagatcttctagaacagtgtttactagagaaaattcataaagacaagagaaagagcaggtgtgtggtttccccagaggcagcactcaccctacattctgaaacagcacacagcaacctagcatggccaatgtgagaccctaagaaagagaacccagtcttgagccatggaactttaaggctgcactggggaagcaccaggccttactgtagcatgggggctgggctccaaattatgtgattatagcaaaatcaaggaaatctgcaacctccagtcctgatctgccacctcagctctcttacaaaatttattgcctcaagtgctaggctggggctctattagaaccagttccttctctggaaggccaccctgcagggaatccattacccttacctctcagtatgtgaaattcactagcacagagcctggcatgtagttggtataaatgtggaatgaatgtgtgcagccatggaggacaatgtcttcagtccctttgtaatgcagaaagtgtgcttgttctcagatcaaataattaacttattgaacaagtgtttataggtatctactaggtaccaggctgtcttctagacacttgaactatcttcttttaaaaaatgcacgaagatatcagattttatagaaaatacattctagtaagcattaaccataagtaaattactatatggtttatgacttcagagagtctctttagcgttaatatattttgcattacaatatatgagaagataagtcggacgggcgcggtagttcacgcctgtcatcccagcactttgggaggccaaggcgggtggatcacaaggtcaggagatcgagaccatcatggctaacacggtgaaaccccgtctctactaaaaatatatatatatatatataaaattagccgggcgcggtggtgggcgcctatagtcccagctactcgggaggctaaggcaggagaatggtgtgaacccgggaggcggaggttgcagtgagccaagatcgtgccaccacactccagcttgggtgacagagagagactccgtctcaaaaaaaaaaaaaagaagataagtctatggagacaagaatcagagcaagttaggggatagggaattctggagggggccacagaagggtggttcccttgtaattttaggtaaagtgtcagagtagcctcactggaaggataacatttgagcaaaattgaagaagatgagagagtgaatcttgcatatacttggagcaagttttccaagtagaggagagtccggtcctaaattaggaaatgcctacatgttctagaactaggtggaatgagaagccataggaaggctttgagaaaggagtgataaaatctgacttccatgtaaaagtcttactctggctgccgtgctgagaatagactgcagatcatcaagatgaaagtggggaaaattgttgtattaacattaaaaccaaagatatctggtgttactctgagctcagaggcttcttccaccagaaaagctcattcaagagcagctgttgttactgctcctgctgatggaagaggggctaaagacatatttgatagcctttctgtagatctcttgactgcagatgacctgtgagtttaggggaaaatgacaggaaggagtcttaatttcagacacaagaaggtctgttgtgaaggcatcttccaaaaggcaatatttgtgctttcttctgttgtgtaagactccctactcaaatttaggcagtttaaggaccttagaaaattgtgctgtggtgataaaggtaatggaagtcagagcagagggataataaaaatccatatgcctctttgaaagcctgtgtaataaagatatctgctgcctcaccgatctgaacagggttgaataagcaacaaatggacaagaatgctcagtccctgagctaccaggagacataggcctttagtgggactgcctatataatttacgggacccagtacaaaatgaaaatgcataacttcctaagaatttgaagactgcaacagcagagcattaaagcatgagttctatgagactgtacaggtttcatacccaggaagctggccctgatcactactagtttggaatgccatcattattcagatatcgatgttacaggcaggagcatgggaaagaccttaaattaatttgataacaattcaacctagtggcatacagaatgagggcaaactaactgagtagtttggtgtagaaaagaagcacctcacctcctcaaattacctctgagatggtgagatgccctgtccttttgacatctacatatttaatataaactcttcacctaggaccacagcagtggcagagatccagatgctcggagagatctatttgcacaagaaaaaatatgcataaagaggttaatagtcaaaccaaataaggggctgagttgtaccgtgagcttttttacaacttcaaagtgggaaacatttattgcccttactcatggtgctgtctaaagaataactttttactctcctgaacatttcagggttctactcttattagagaaattgtactattatcattttatttttaaaatatttttagaaatgggggtctcactgtgttggtcaaactcttgagctccagccatcctcctgcctcagcctccaggggagctgggactccaggtacgcaccaccccacccggccactgagtcactattaaaaatcatttagcatagcccggcctggtgtggtggctcacgcctgtaatcccagcactttgggaggctgaggtgggtggatcacctgaggtcaggagttcaagaccagcctgaccaatatggtgaaaccccgtctctacttaaaaaaaaaaaaattagcctggcatggtggcacccgcctgaaatcccagctactcaggaggctagggcaggagaatcacttgaacccaggaggcggaggttgcagtgagccaagatcacaccactgcactctagcctgggtgacagagtgagactccatctcagaaaaaaaaaaaaaaatcatttagcatacccagtctggggctttctactgagagcctttgttgacttctcttctaaggcaaagagcagggatataaagaagtaacacttcgaaagatggatgttctagttacatttctaggctctgaaatcaaatacttaatccacttattgactgattaatttatccaacaaatattaaacttgaccgacccttatagtgtctggagcctagtaaataactattgaataagctgtgaacagacagccaagtcctgcggactcagagaataatgagacaaatcagatattgaatcctggcttcaccacttttgagcagtgtgacctggagcaatttgtttatcctctctgatcatcaatttcctcatctataaaatgggaacaataatattaacacctattttcacaatcatgtggattaatgtatgcaaagcctctgtttcatcactaagcactcagtaaatattagctatcatcatcatcattactaatttctattgatttaactagacacagaaagggcagcatgtgtcttacaagccagcgcttccctcttctaaccactaattcaaaaaggattgtaagtaatgtttagaggtcactccctagcccaaaataggatgccactgtgttgtgctttgttttctttcttcctccagtgctgaagcacttgtgtgttttggttaatctaagatttaaaagattcctacatgtagtcatgcaaagtacttgtatatacctctaaggacctagcaggtctagtgatcctggagtctcatatccgaaagaggaaccagtactaaaagacaaacttcccaaaatctaaagaagggaagtgcaatcaatggtatgagttagaagcctcaatcctgggagagacagcctgtgcaagccaggagaaatcatgggttctccagtccccagcactggagcagccatgatcagtgcctccacttcaatgcttgtgaggctgttactctctggtgagcaaaatgacagtttaaaattttggctcttttataatttctcttatttctcattttgttacttagattcaatgtcgtttccattcattctaataagaaccttggctttccaggaagaaccactagagactcagtgaattagacacagggctatgtgaccctttcttcaggggcacacctgacgttgaactgtacctacagaatgggtaggtaccttcctcttgtggtatgtccaatatcccaaagagatatcaaaatgccttgtctctgaggcatcatgataaatgaaaaggaagatttcaggcccattaagttaagattaaaacctctttccacttgcagaaaacctctatccaagcactaggcacaattgtgtacttttatgttcctaatgacacagtaggggagactaacagaggagttgagtgcaaattgcaaggggtatgagaggggctgggtgtgagcagtttctttttcctatccagacagggccctggagtgcaggagtgtatgtgggaagttggacaggcttcgtgatttgctatcccaggttaagtagcacatgagactgcatcttagaaatggggaaaggaaagatttgtcaaaacattgcccatatctgtcctctaattatagctcactgatcaaaactacaagcctagtaatgtaacgaaggaaagttctttgacatcagttatttaaaatatgtacaatgtgattttctgaaatacctttgtatttaaaatgtaatttaaattacccttaaaattaaaataaatcaataactgttttagtccattttgtgctgctataatagaatacctgagaatgtgtaatttatgaagaacagagacttatttcttacagttttggaagatgggaaatccaaggtccaggggcctgcatctggggagggccttcttgctgcaccatactatggccaaaggcagagggcaaaagagtgcatgcaagagggagaaacggataaagtgccaaactcattcttttatcaggaacccactcccaagatatctaacccactcccatgataatgtcattaatctattcatgaggacagagccctcatgaccttttaaaggtcccacctctcaacactgttgcattggggattaaatttccaacatatgaactttggggggcacattcaaaccataacaataataaaacattaatattcctggggaaaatgagcaattcacaaaaagtagtacaaatggccactttataaagaggtatataaattctttagtcatcaaagaaacatttaaaaaagtgattcattttttccagctatcaaaatagtgaaggttactgacacacacacacacacacacacacacatatcatggaatttttttctgttactccaagaacctcctatggcaccatgagtcttgagccatttactatgtaaccagaaataaagactgcaaatactcaactgtaagccaagccacttctagtctaagtgcaagattgcatatttgaagagaaatatttccatttctgagaaaccagataaaattatgccaggactgaggaagaaaaaaagagaaaaaaaaaaagagcagtcaggaaaaaaaaagcagtcaaaaaaaaaaaaaaagaacaaagttaagtagactttgcaaaatgacttcaattgaattacaccatcattatcaaataaatcttcaagtccagataaaaaaggaataagtgtaccctcagcactacccttttctagaagagagaaccaaaaatatcttgattcactaccgttttcagtgaagaatattgcaaatgtgaaagatggtaataacaggagcaatcaaacaatagacagtcctgagaggttactgctcttttactgtaaagctaaactttgaaatgtgaatgctaagtctttgttaacacaattataataataattacattttagatagaatttcatatttattcttgcattgttgaagttaattctattttttgatattcagattcagctttagcttcccccagatattgactttaacatctcaccattcggcatttggtcacaatgtgtgttcagtggaccatgttttaaggaaataattagacgtatgaagagggtttatgtaagcatagatttatcacaatgttgtttgtaaaaactgaaaatattgaaacaactgtctaaaatactgacatgttgtgatgtctaagttctagtggaaattattctcccttagaataagtgttgtagcgataacagacttaggagtgtggtgagtcccctttgcacaaaaagaccacctcacacccaacatgactcttaagaatgaggacagtagtgaggacacactgcagaacactgagaggcagatgacgtcttataacctgttcattaacttgccacttgggggtgctattcaccagtgaaatcataatttatgcatgaattctgagtacaactgtgaatcctcacttcaacagtgatgccctctgctaggccagagacactaacaatgaactcctctctggactttctaattctgatcttaatgtttggtaagtacattttattaaaattttttgtattatttcaaaataataaatacttctccaaaagatacaacaactctggccaaacccataaaatcagtacttttttccccctacaggaggaaccagcagcaattcagtcaagcagacgggccaaataaccgtctcggagggagcatctgtgactatgaactgcacatacacatccacggggtaccctacccttttctggtatgtggaataccccagcaaacctctgcagcttcttcagagagagacaatggaaaacagcaaaaacttcggaggcggaaatattaaagacaaaaactcccccattgtgaaatattcagtccaggtatcagactcagccgtgtactactgtcttctgggagacactgtgttaaaagcacagtgggagctatacaaaaacctcaaaggctcagaggaagtatgtagtgaggctggaaaacccaggttgtagagccctgttctctctttcacagacagtcctgttaagacattattagaagataaggaaaatcaaaatcagatataactgcctctaattccagggggcacaggggtttctttgacagaaaatggggtcagggaagagggtctcagatgatatccctgctctcaattaggtcagttctctcttgtccttcaggctttcttgcatgatgtgtaggaattagaatatgatgacttggatgtcagtcctggctctactacttattagctatgcaaatttggccaagttaattgatgtctcagagctttagtttttttcacttgtgaagtagaaataaaaataatcacacaaatttagcatggagataaagtggaaaaaaggtaggttaggaaggggcagattagtactcaaagcatttctggaacttgcaagtcccaccgtagcagttctgctctctcacagcaatctctctgcctagtgctgaccatcctaacagggcttggcatgcccactgctttgtcacaccacaccacaccccacgccacgcccagccccaggccattatgatcaacatatcatcttttctctcacaggctcctactgacactacacacaaaaattaactcaaagtggatcatagacctaaatgtaaaaactaaaattgtaaaacccttagaagaaaacatagcagtaaattttcatgatcttgggttaagcactgatttcttagatgtgacaccaaaagcacaagcaataaaatagaacattgataagttggacttcaacaaaattaaacttgtttatgcttcaaaggacaccatcaagaaaatgaaatgataacccacagaatgggagaaaacatttgcaaatcatatgtactatgtacccgatgataagggacttgtatttagaatatataaggaacttttacaactcaataataaaaagaaatataactcaagcagtgagcaaaatatttaaatagacatttcttcaacaaagatacaagaatgtctaatatgcatatgaaaagttactcatgattagtcatgagacaaatgcaaatcaaaatcacaagatatcacttcgcaaaagtaaaaggctatgactttttaaaaaggacaataatgagtcttatcaaggatgtgagaaattagaaccctcatacattgttggtggggatgtaaaatgatgctatcactttggcaaacagtttggcagcacctcaaaatgtgaaacatagaattagcatatgacccagcaattccagcccgatgtatctacccacaatgcatatgtccccacaaaaacctgtgcatgaatgttcataacagcattgtttatggtagtcaaaagtgtaagtaatccaaatggacaaaccagatgtggtatctctatacaatggaatattattcagccataaaaaggaataaagtactgacacctactacaacatgaagaatcttgaaaacattatgctaagtggaaaaatccagacacaaaatggccatattgtgtatttcatttatatgaaataccaagaataggcaaatccaaagtcagaaagcagtgtggctgccagaagctgaaagaagtggggagtggggagggactacttaatagatgtgtggggtttcttttggggaaaatattctgaactagatagtggtgatggttgcgcaacattgtgaatacactaaaagctaccatattatatactctaaagtgattaaaagtatgaattttatgttgtgtgacttttacctcaataaaaaagaagacaaccaaaaaatctaaatgtgattcttaatgggacaagaagctctaaaaaaattaaattcttactattccattgcaaacaattccaataagtatgtgaaatatggagccatctgataaaacctatagcagtacgggaaggtatactaactcagcttttaactaaaaattatacaaatgttgactgacacaaaggcaaaggagaatagcaaagatggcatgagcctttaaggaaatcgttaaaaagtggaaaccttttaatgaatgcagttaaggcttaaagaaaatgtgaagtggaacataaaaagcgttttagaacagtttggagaaatgaagagggtggggtggggaggaaggttaatttacatatcgaggaaaacagaataattttggtagagaataaagaagaggtagggcacttcgacccctggtttcatcctctattcttcatcaaatacaataattttgggccgggcgcagtggctcatccctgtaatcctagcactttgagaggctgaggcaggcatatcacccgaggtcaggagttcgagaccagcctggccaacatggcaaaaaccccatctctactaaaaatacacaaattagctgggggtggcagtgggcacctgtaatcccagctactctggaggctgaggcaggagaattgcttgaacctgggaggcggaggttgcagtgagccaagatcatgccattgtactccagcctgggcaacaagagcaaaactccatctcaaaaaaaaaaaaaaaagaaaagaataattttcaaactggaaatgaagaaatgaaaaattatgacagataaaaagatactaagagagaacttagatgctttgaaaatgatcaattcttctgggtcttttaaactaatccccaacatacaaaaagaatttgcaggcatggttggcaaggcattgggagaattttttgaaaacctatcaggaatgaaggaaatccccaactcaggaacacagaaatagtggatcgatacccagcaaaattctagagcagattattaacagataatgtgtgggctcttagaaaataatgcagtgatcagtaccaagccagaatgagctcactaaagacatttttaaaacaagtcctaaattcaaaggacttccgtggacttcaaacgtgtcaaatatttgcaagatatttaataatttgtttttcactatatcaatgggaaaaatatatatatattatcatttgttgagtgttgtgtttatcacaggccctgttgtactacatatgtaataagaactaacatttatttatcaagggcttaatgtgcatgaagtgttgttctaaatgctttgcatacattaattcacttaatcttcactacaacctcatgaagtaggtgcaatccttattatagataaggaaactatctttaatacagaagaattaactaacttgcccaagaacacagagttagtaagggaagacctggcatacaaatacagtttgacaagcccaaagcctgcattcttaaattctatactttgttacctcccaatgttatctgtaatccccaccacaaaactataattttggtattgttacacccattttatgaataaggagactgaggattggagtattgaatagaaaaatccagtagaatctagtaagtagtaagactaaggctcaaacctaagttcatttggatctagactgtatcctctattcactttgtcattctgcgtaatgctagacttggtgaattctcagctgaaagaacggccatgtataaatatacaatttagaaaaatgtccctattgttacacctcatgattttatccttcactttgacctgttcacattgatcttatgtaaattcacacaaggtatgcccattaaatgtacaaatagcaaattttgagatcggtatatgatgatcatgtcctaatgatctccagctaatatgtttatttacagcataaattaaagattgaaaatcatctgaacaaactggaaagatagactgaaactgtcaaaatagaatttaatggagataactatatatttatacagtagttttataaaaatgagttgtaatgtctggaagaagggatcctgaatttttagtatttgttgtgtaacgcgctcatagtaattaaggaaaagattttctgaaaggatattagaaattctcataaaatcaatttgtgcaaaatacagctaggactcacagaaagaagaaaatcaccaattggctatgctttccgaatctacttttctctggatgtatgatctgttctcctcctgggaaaccagattccactgtaagcctgtcatattctactccacaataacttcagtttgaacatacccagctctgtttgctaagagatgagtctggtttgaatagcacagggctttaaagctctagttacactgtctaactgcggtttctgtacctctagttcaaattaatgagcgtagtatcttcccagatccaataagctattgccagaaaaaggaggttatttggtacaagcatgacctctatgtcatctctttagaaaggaatcccaaaagtggaaaaggactacatgctcaaaataattcaccaatgtgataaaacaactgaaactatcatagataacaataaaacaagtggaaaccagatgagtacagtaatactctgacagggcaacaatatttgaatcacatttgaagagacgtgaacaaactgtagcaagtctaaaaataagaaagataaaactaataaagtagtctgaaataataccatgtgcagaaagaaacaaggatgtcacataaagaaaccagagatatttataaggacacctttacaaaaaagaacagatctggccttgagttttcaaaagatataatgtgaaatgcagctactctacttgatctatcatagctggctgaagtctaacaatcaacaagcttctgttctcccacactaccctcacctttcttctaggactcctagtaggaggatgctaagtttggttctctatctgtattgtgggtgagaggggctgtttgtttgttttagagacagggtcttgctctgttgcccaggctagagtggagtaacatgatcatatctcactgtatcctcaaactcctgggctcaagtatttgacctgcataataaatgtctacgcctcatgccactaggtggcaatgtgggtgttatactgaaaagatcacagatggttcactttgcaagtaaaactgtaaatgttcttaagtgtgcatttctgctgcttctgatgggctgaaaatcccctttgatttctaaagtaaatgtagagacgttttaaaaataaaggactcctttgtccaagatatattccgaaatcctccaacagagacctgtgtgagcttctgctgcagtaataatggtgaagatccggcaatttttgttggctattttgtggcttcagctaagctgtaagttggggagtttcaggacatgagatatttttcaaaattctggggaggggagagaagggactccaagtggctaatctggaggccctcctgaaaatgtgtaaagaaatgtgtataaatattgcaataattgtaatattctgtatctgatgatgtctttgagaacaggtgtaagtgccgccaaaaatgaagtggagcagagtcctcagaacctgactgcccaggaaggagaatttatcacaatcaactgcagttactcggtaggaataagtgccttacactggctgcaacagcatccaggaggaggcattgtttccttgtttatgctgagctcagggaagaagaagcatggaagattaattgccacaataaacatacaggaaaagcacagctccctgcacatcacagcctcccatcccagagactctgccgtctacatctgtgctgtcagacacagtgctccccaggcacctggagcccgtacctaaactctaaagttgaggcatcatttcttactcctgtctttcagacttgtctgtctctatccttggtcagatgatgtaaaatgtttaagtttttaaaatataatattctccccttctagaccatctctcttctctacaacatcatcaccaattatgttaaccagacagtatgtgatttttatcttgaaagtaaaatatacagggtataaaaatcccgattctgctacttattaactggatgatcttgacaaagttacttaacttctctgtgcttcagttttccctcagctataaaaaggaaacagtgttagccatggtacgtaaccccaattgtggggattacatgaggtaatatacacaaagggcttgacacatttcctggcacgtagtgttacataaggggtatcaattattagtattagttttagatgtaccatgagtttgctaatattcactatggattaataccacagatcattggagaagtatgtggaatataaataataagcaccttataataattttagtttttagattctttcctaatgatgtccagcacttggcctttttaatagtgttaagaaaaacagggagtagctgtagaaaacgtaatagaaggatgactctatggtttggtttgtggtgtggaaatgaaagactggtaagagatgtttctgaggaagctcagctgcttctttggaaaaaaggacaggttctaagttttcatgtggagatctctaatggaaacttgcatttgtggaaattcatgaagcaaaatatcaaacccagtgtatctaaatcaacggttctgtatatcccccaaggattctttacattactattcccaatcccagtggaattcttatatcaaaacaagttttatgattataattgttcttattactcaacaacatcaatcacatatattaaattacagctacattcttttttaaaatcaaaggctttttaaatcaaaatactacctgcacatatctaaaaagccaatagtattataaaggtctgttccttccttagcccatcaagaaaacagaaataccatgctctacccccaccttccaattcaaatccattctagcaatttctaattaatatgtatatactcttgatttatcattattaagcattatctattgacttccttctatggcagcatgcaaatactctcactttctcaacatagttatatatatatcataagctggggttaaatagacagtcagtgcatatatgattatgaccacatgaatattgccactgtccaaccaaaatgacaactatgagtatatatcctttctggtacaacgtattttcttagttaataattacatttttttcatttattctatgtcaatgtgctattttttctaagttcttcaacacagtcttaaaaatatttattaataatttctctcaaatgcttcaagcaccttaatttcttttttttcccctcaagattccctttcctttgacctccattgtttctctgtgtgaactgattgctctataagcataaatgtgattctagacattttagtaccactctcccaagttggcattcttgcattttggatctcatatcttcatttcccaaagacaaatactagagagaaaaaagggagaggaagaagaaggagaaagagaaaggagaaagaaacactcttgggctcacttttgaacaatgagagaaacaaatgaataaatggttcctgccctcccccatgccctgcaggaggaaaagtctgcggcatattccaaaagactcttcagaaggtcatgccaggatcaggcaccagtcatgcacatggtggccagctccattatgcaccattgcattggctctctccactacccaaatttgctctcttgatccctcactcctgctccatgagatcagttcccaaaaatgccctgcatgcaaacctttatctcagtctcagcttttaagggaatgtaagctaagacatgccttttctccctgtgaatagagaggacacggagccagaagacacaaccctgcccgtctgctctcagtagtgcctcatccccttcaaaagccctagatactggcctatgcagctgtcccagggactactgaccacagcttctctatcggtgatacatgttcctggcttcctgtttttaagaagtactggacacacctgtgtcactttcctgaaagaaagagtgctgagattggagggtccaagtggaattacaggctgagacagagagaagatacaggagatgctggccctaacagagagggaaaacaaaacaaaacaaaacaagaaactattcttatgaaataaaataaaaagtctccccatctgagagtccactggtctttcctgaaagccaagtcatttttccatcgaataaatgcacgagtaaaaatcaagaaaacataaacatggataaaagtttcctcatagagttgacaagattattcacagagacagacttcttggtctcaattttctcagcatcctcagagtttactgtgtggacactatgatcacagaaagaatctcaggtgccaaagctagcaattcaagttgtttctggtggaagtcagtgccctcctgtagtcaaatgaatgaactagtagaaaccactgctttggtcagtttcccctctcctgtatctggccttcagcacctcagtagatgcttagagagcacttaccaggcaccagctcccagttgatatgggaaccattagaactctctccagagaaactcagtctggcccagtgtttctgacttcaagcctcatttccatgaatcaggtagctggtgaaattgatagactgcaaactccatgagggcaggaaccatgccttggtcattacagtgtccccagtacttagcatagtgcctggagccaggagcgttctcaatgatctacgctgctttgtcatctgctctgataatgagagtttcttgatgtcaagggctgtgttttgttcatttttgtatccacaaagggattagcactgtatttaacaatagtagaaactgaagaaaaaaaaattgtgtggaattacatttcctctttttcatcagaagtgacttagtcttgctgactttctttctatgcccttgtgtgttgcctctttgtttgcttacttgatttttttgcctcactgagaatgtaaggtctgtgaggacatcggcttgtgtttcttcatccctgatatttcttttgcaaccagcccaattctgatatctagaaggaggtcaagaagtggtttttggaagaataagtgaatgtaatagttatttcggacttgtgttaaaaggcctctttgcacgatttagcagaaaaagcactggagtcttagtcccggttttgcagctaactgggtaatgtaattctgaagtcacatccccactttcggcttcagtttataacctggaaaattaggataataatacacactctacctttatcaaaaaaaatcacgatctaatctgaattagatcatgaaaatgaataccttttaaaaagtgaaaaattttaaacaaacaaaaattaatattattaaggaattatatatatatatatggaattaaatggacaagaaatattatcctaatatactccaagacaatagttttcactcccatacttatccgcactgctatacaattcagtcagtgccaaatcactacccacacacctggttgtccttattactgtggctttgcaaccttcccatcactcagcttatctaaatattctcctgtatctaaaaccagtttttagaatctccaaagagcttgttttccaacatcccccagaaacatgcatttctcaccttactgagccaaactattccccagtgttcatcctctctccaagaaaagtttttattcatttggtcattggtcaacatttttctcagctgtctatttctcaaaatgtatgttctattctactattttcttaaactaatgctattttcaccactggccaaactttgtatttgaatttgaatcttatttgaattttacattctactttggccatatctttgtaatcagaaataccagtgatagtactcaccattcggtgtacaaagtatataaaatagacatgctccatatctattaagtgatgaaaattttctaggtgattttattataaaattaaacatttttagaagaaaatgcttctttagtagattgagaagaaaatattccagggaatgaccaacccagtgatgtcatcttactgtatatataaattttcatacttgattactactataatcaactacaatgtgaacatttcttttgaagtgctaatcggtatgaaatattctcttcaacctcagattaaatattcaccctcagtccccctcatttcccctgaaatacaatgacattaaattgcctgatctttgcattttctgatttattttatttttatttattttcctttgaggtgggctgggtacttgcaatggctaatagtgcagagctgcaattctaggcactatcagcaggtgttttaactaacacattatgtggattatttaaaaacttaatttaaggtatatgataatatagtactgctttgtatttttacaaactcatatttttttttttttttttttttttgagacggagtctcgctctgtcgcccaggctggagtgcagtggcgggatctcggctcactgcaagctccgcctcccgggttcacgccattctcctgcctcagcctcccaagtagttgggactacaggcgcccgccactacgcccggctaattttttgtatttttagtagagacggggtttcaccgttttagccgggatggtctcgatctcctgacctcgtgatctgcccgcctcggcctcccaaagtgctgggattacaggcgtgagccaccgcgcccggcctacaagctcatattttaaagctccattcttagctcagagctgagccattaaagttcaataatgtaagacagcaagaatgctaaagcttgatgctaaacctattcagtaatatggaacagcatttgagatcaggaaggaggtggtcccacaactgggaattaaaatcaaaatggatttgagcagataaagctgcatgtccaaaggaagttggtgggaaaacttgaatctgccaggaattttctgctagatttactgcagatcctgccagattcaagccaagcatagaaaaataagcagaaaacctccttcatcactgcctgtgaaagaatgttgagtccaagagacgagtagagaaagacctctatagattaggacccattaatatacactgacttggcaaaccgagacctagaggcaagtacagaccacaggaccaccagatgatttactaccttggatcctactggtggcaaaagctgctcccagggtccacttccctgtacagaaaactacctcatagaaactgaaaattatatggcaatatacatcaaagagtccttgcactctgaccctgtaatttcacttctagaaatttcttctttcttaaaaaaacaatcaagtatgtacaaagattcattttttaaatgttggtgagagctttatttaaatgagtggagaaggaaaagaaaccccaatgtctcacaaaggagttgatttaaaaactgggggcacattggatataaccaataaaaatcattttatctaaacttctgcttccagccacgccgaaataacagggaccagatttaccattccacttgaaacaacagcaactgagaaggctgcagacaaatgacataaatcaacaatttccaaaacacggtatactaagcaataaatgaccatgatcctgagagatgggaaacaaatgaggcgagccctaacattgcaatagcttattgccttgagagagtttctaggccacagcacaaagaggggaaactgaggcagaacctggtaggctccctgaattgaggcaacagatctgagacagagaagactaaggcagctgaagttcataagacagaatacacgagaggagagaggggcacagagaggacctagagatctgccgagggtgccctcaagtattcagcagaatgctcatctgcgcacgcatgtggaatctacccgagggtgggtggcggcagcagggaataaccattcaaaaagattaaaggaaagaggacctcttcaagtatgtctagaatttagaaaagagtttattgcttagccatatatttcttaattctttaattaatatttcatacatttcattttctctggctctagtcacttatcactgtggtccattttcaaacaaagaatcatttcacatattgaggaaacaatatatgaatagcctgtctggcttagataaagagtaaaggcaagagaccaggtgcggtggctcacgtctgtaattctggtcctttaggaggcagaggtgggcagattacctgaggtcaaaagtttgagaccagcttgaccaacatgatgaaaccctgtctctactaaaactacaaagaagtagttgggtgtggtggcacatgcctgtaattgcagctattccagaggctgaggcaggagaatcacttgatcatgggaggcggaagttgcagtgagtggagatcacgtcactgcactccagcctgagcaacagaacaagacttcgtctcaaaaaaaaaagtaaagacaagaataagtatcacccatatggcatgaccaaagtttttggtaaacctagggttttttttctgttgtcagtaataaaattgcccttaaaaactagtttttatttctcattcctgaactcatttacatataatgtcgaagtatgataaattcaaactatgctgacacctgtacgaatgtggcttagtatgatataaagtctttatactttcaccaacttcaaacctcagtttctactgttataaagttcatttcactctctcttgtgaccatttaaatactttcacatatttcatcgcatttttcatcttctagggctgaggactcctaattcttaagaatatttctgttatccctataattactgtcgtgtctctccaggcattcttttttagtgaacagttgtcattaatcacttccagaaaggattcaaacaccatctctacatttatccttccaagtgctgtgactattgccttgcgaactacattttccaggctcccttgcagctaaggtgcagatctgtattcagccaagtatttgattgggagatgagccatatgaggaacaggttaggcaggggcatcccttttcttggtttaggggcagtggaggccatgtggtctgggttaggcagcaacagcatcttcttgattgggccaggagcagtaacttcctgtttgggcccatttggctgcatattctgttgctggcagcactggaggcagctggcatagggataggactgcagccttcttatgaggctgatggatgggtggttctgggcatcactcctggaagtcgagcctagaatctttttctccagtctgcccaatgattctatgagccttctgcctccccaaatcctgatctgcttacactaggtaaagcgatttcctttctttcttgtcccttagcacacagatatctcacagtgtttagtctgagacccaccacagctttcattccagcatcctttaagctgagtatcagacctggttcactttttcactgcagtacacttggctcattccaatgaggatgacttcatgtttatagtgatttctggttcctttgcttggaaatcctaaaagatagaaaagagtctccagttgctgcagacgcaggcatgagatataccgaaaactctccaaaattgtctcttggaatgtttcttcattacttcactaggtttctttctaaccttcagagctagtaaggaccttggattaaaagggccattgaatttctagtttagttaagaaatattttcctcatttcatgggagtggggaagcagtgcagactaaactcagagcccacatcatgttgttcttaccagttcaaatcaaatcacggtttccagtcacttggctaatatttatccttctttaaatcttgatgaaatgtctcttcctcaatgaacacttctctgcccctcaacctaaatttgttcccctcgtgttactgttttaaagaaccctgtaatttctatgtatttctgtgtgattatttgtataatatctgtccttcctattaacctctaagttccactaaatgctctgtgttcagaatagtgcctggcacaaaggagtatgacaaatagtgatgagtgaatgaatctgagccatcagacatgtatcttactttgtgttgggctgtccctcaagtgtagatgttcctagtgacaatcccattaattcaaacactgactggagaggattgaaaacatatgaagcagtgcttttggaactgaggctgtagtccaatatgactggagataaaaaatgaagactttaaaaacagaattcacataaaagcaggtatcaacatggaaaactgcagaggatgcctgtatacacagtgggcacagcagcagcattagaccaatcacctccaaacttgaggttccaggctgaggtgacagatcagagtgaaccaggcactgtagaacaatgggaacacttagattcctgacactggaatttgctgattcttctactaacgtgtagcaagaaatttagccttacccaaagtcaggtctggtctttgtcccagttcctgggagataacctctgaaggctcggaatttcctgaattgttggcatgtctttataattgatggtggggtccttggaccgcacttaatagtttctgctatcaagatgactcattgtgaggctggccacaatcaatggtctcaggatgggggctggccatgccagaaagaccaaccatataacatagggtggagggtttgtgtcacaacctagagagtgagttcaaccacacaggctatcagtcatctgatataatgaagccccaataaaaactctggacaccaaagctcagctgagttttccagactggcaatattccatgggtattgtcacgccttgatgctgggagggtaactcatccctgaggacagtggaagtttcacgtttggaaccctaccagactctgccctatgcatctcatcccttggctgcttttaatgtatcctttctctgtaataaacgaatcacaagtatactaggtttcaatgagttctatgagtctttctagtgaattatggaacctgatttaggaaatacccaaccttgccattggtgccagtagtgagagtggtcttgcatgaacttatctcccctttgtagttgagtcctagcgacttacagttgggggcagaagtcttatgtagatttagtctggaggtctatgaccttaaccttgcagtttggctaactctgggtagctacattttgtattgagcaactctatatgaataaaagaagttttgttcatataatgccttaacagtgaatcaagtatatcaagaaagttttttaaaagttaaaagtaggcaagtctactggtaataaagtaggcaagtcacaaggtaattaaatgcctacgtttcaatgattacacatgttgcttagaacatacacatatatgagatcatcacgttaaaatatttctaacacacaggctggcaacacctaacaataataataattagtaattgtctagttcttactactaactggtttctgttctgagtgttctacatatattaactaatttaattctcataagaactctggttattagccaggtttgtagaagctgaggcacaaggaggttaaatacttcgccctatggcacactcccaaaatttgaatccaaaccatccaactccatagctcatgctcttaaccaatgccccatacagcttctcagaaggcaatcacttgaaatttctctctgatcttatagaaaggtgttagtagactggttatcttaacgtccaatcccaatcatctttgtagcaaagtaatatttttatatgaacatgtcagaggcatttgaaccagagcaactccatcttgaataggggctgggtaaaatgaggctgaggcctactgggctgcattcccaggaggctaatgcattcttggtcacaggatgagaaaggaggttgacacaagatacaggtaataaagaccttgctgataaaacaggttgcagtaaagaagcctgctaaaatccaccaaaaccaagatggcgacaagagtgacctctggtcatccttattgctacactcccaccagtgccacgacagtttacaaataccatggcaatgtcaggaagttaccctatctaaaaaggggaggcatgaataatctaccccttgtttagcatataatcaagaaataaccataaaaatgggcaatcagcagccctcaaggatgctctgtctatggagtagccatacttttattcctctagtttcttaataaactttctttcactttactatatggactcaccctgaattctttcttgcgtgagatccaagaaccctctcttagggtctggattgggacccctttccagcaacaaagagatgtgtattttatttctgaaaatacttttttgctttgttatcattctcatgttaggccagcagctcaggaagtcctggtctccttcctatattggaaaagggagttcacaatgaacacaaaagaagaaaggataaatttgaaaattcctctggagacaatagaatggaaaaaaggggttttgagtttgggttacgacttttgagtttaaaaataaatctatgcctcaaaaagttctcttagaatatatctgaatacaaaaaccaattatgcaaccctagatttaatgcaaatttcttagtttctgggaatttctggggtgatggagacaaaagcaagaaagtaagacatcagtgaagatctctgcccatctccacataccctcccagcagtggggtgggaggaggcaatttttagcccccaaataggatgttaggaatctgaaactagaggagattgacaactaattcctctcagaaagactgagtgacagtatcctgcaaatttccaccagggcagagacagctgtgcagtagtgccaataggcccagaaagcccaagacagccccattctgccagactggaattagagtagttgaatttttgcatgcacacaaaaagcatagaaattaacagagagagacttagtggacctggatgggtgtcaatattataataaaaaggatgcagagcatatagattaacagccagagacctacagggactcagacatcaggacattagaaacaataatgtcccagactggaccctaagcactgcaccccaacagatgccagtatgggccaggtgtccccaaccaatgccagaccaccagttaaggcctctacattccaccccaaggatggcgaggaggaaatctgaactgatggaagacatcctgaattgacttagaaagtcatgattttactgagaaaaccctgtatttacttaaagcaagctttctgacaccacgcaaagtggttaccagagttagaaattaggctgttatagaaaataaagctatcctggattgaacatctgagtaaattacaaaacatttacccgctacatctctattcaccagatagcgaactcaagcattcctctgcccctacataaatgacaaatgacattcacgtgtattacatatcccctcaggcctaactagggctgtgtgctgtttccaagaccaaaatgtcacaactgtaaaccactcacctggatacttgctataagaaatagcttggattagtatggaacttggtgtaaccctcaaatatgggagtttgtcactagaggtaccagaggaccacattctctgttaggggacctcgatgacagtatattacaatgaaggcagtgactggcaaacagcagcttcaaataggcatgcaaacaaacattgagaaacagtaagcacataagataactcatttagacacttttatatgcagcatgtataggatttaaaataacattcccaagttgaactgaaaccattactatgtaaatgccacagccaagtcaaatgaaatagtaaataccagccttgcaaattggtctccctcaagggcactcaaaagagttagactgcgtgctgctgccttaggaaatgtcctcctctctatcaatcatttctgctttgacatcaaacccattgaccagcatatgttttggaatttctgaacaactgactttcaaggattcacattcattctgcactttcttagaaacctcacaggagccactgttgccaataaaataaaataaaaaaacacaaacattataaatctaaccccaaaatgggattgcttcaaaagagaatggacaccccactccctacattgcttgtacacatctgtgttgattctcttggtgaactggcccatgcaagcaggagctcatcaatcagcagttgtcaccaagtgcaagtcagaattgctcaacagaaaaattgagtctttttttattccctattgtcacctactaaaatgtaagttgcttgttgatctcatcacactgagctatgtttcagggaagtgttgaaaaggcccagcctgcgcatattcttgaaattttgaaataatggctcagtgaacagatgtatactttctcccaatggctctttgtggaaatgaattttttatgagcccaaagtatctttgattcatccctgattaaaagtcaggttaaaactaaataccatatactttttgaaagacattttaggaagttattgacacaaggacttttgagactgaaaatcatgggttaacaataaacctttgtttggtgaaacaaaagaacagtacaggacagaggtgaaaagcacaggctccagggccagagtccctgggctcagattcttcacatttcagctctgtaaccttgaacaaactactccagttaatcataacttcagtcttttttaaaaaatgggatattaaataatgggtattaaataatagggttgccatagaggaaaatataaggtaatatttatatgcacataaaacagtgcctggcacagagccagtgttcaattagtactagctattttttggatacatgtagataaaagaagcatttaatgaatagttacatgcccattaacataaaatgtaagccacttccatattctgtagcttatggtgacaaagttttctgctcacgtattaactaaaaggagcgaagagcttccctataatattgaaaattttatcctaatggttccaaaggactgttttctaggaatgtttgctacagaaacctcactggttagatgtttgttggagcacactgtgattattcattgtcactgcaaactgtgtttaccacgggaggctgttctgactcaccactttgtgactcaccgattagtaaacagctaaatgtcgcattgctgatttaggtgtaatttactgcgtcaatataaaaggactctgcagattctactaaaatcaagaacatagctaaaggcattcttcatcgtaaaaacgaattttagaaaacaagatgactctaacagagttactttaaaatacaatgcaatatgtctattttaaatgacaacaatatctcctgtctgacagcattcaacttactttcagatttattcggtgttttctcaacttcacgagaaattgaaaatccataaaggagggaaatatgtcttgtttcattttcaatagttatatcaagaatacttttcaaaagtatttcatatttaccatgttttcagcaagtaactcttaacaatactctgagagtatgatcgtgatgataggtaaaaatcaggatcactcccttttcatctttacctgtgtagagcaatgtaatgtgcccttttcccaaaccctctgactccatgagggatgagacacagagggtgtggctgagggctcctaggaccgggactccttggctgatgtcctgtggcctgcagtccagggcttgcaggtgatcaaacaggaaaggagaaatgagggaggcacagtgctacgagcaggcctgtgttttcactgggaatggtggttagcagatgctcagatgtgtctcttctccctcacactcacctttggcttggctcttaactcctgcccacccctccctaaaccctctgtggaggtccggaactgagcgagtcacagacacccagcaagcagtctccagagaggcctctgtgcatgaagacttccccagaaggatgcccactcttcctacctggcctgggaactcaaaatgggcacaaaaactgaagactgtgagagagggtcagcttacaggccagaaactgacaataagattgatgttcaaatagctgaattattgattcttatcctgagatccactcctcattttcagtcttgcgataaaccttagtgaggggtgttttgtcttgtgttctatctattggtggatggattccaacttttctgaatatggggacgtaatttttaaagccaaaaattttgcagatagtaatggatttttaacatccattgattaacaaagtactatgaaaacagtaacacttttaaataaatttgctttcagtttttttaactaaacataatacatgcatgtatatatttaaacttatcacactgcctggcacagtgaaagcactcaaaaaatattagctataattactcctattgctgttgtttactcaatcataggtaatgcctggtatacatgtggattcttagagtccttatagaacacagcagcacataaactatactaggctctaaatcttctctcccaagaacttcatctgatgcatatttcaccagcaacagcagcatttagcactgtcttgctgtagaaaaattcttgataaattaattgaattaaatttatgtcacataaaatgtcatgaagagatggaagtgtcttggtcctgtatcttagcattttcaaacctctccattgttttttttttaatgtatagatttcacctgtgtaaaaattaaaaataagaaaactgatcctaatgctcttcatgaaaggcaagaaaagccttcttggaaagcaatagttatgggagagttctgccagaatttgttctcagaatgacatgagaacaattttattctaggaaatagaggtgctgaggactcagcttctgacctaccctagatcataaacatcactgcactaacagccaattaagaataatctaagctcttgtccttttataacagacctggttatgtcctaaaaaataagagcatttataaataaagaagaaagtttaacagttcaatagatcaacgtgactttccagctcctctctgaacaggtgacatctatttccccatcccttgaatctcagttggccttgtaacttatgtggatcaatagaatgtggccgaagtgacagctgtgcaagttctgagccctcacctcaagagcctttgcactctgtcacctgctctctcagacctcggcttttttccacgtgaataaaccgaggctaaccttctggaagaaaagagaccatatgaaacagaaccacatcagcctgaggccctggacatgtgcgaaaactgaagatcagcaaagctgacctgaaattgagtcacagttgacctcagatgcatgagaatctaaccaaggctgaaaacatttggttgaatcccacctcaatttctgacccagagatagcaactaatgtacaatatcatgattgttatgcagtcattagaaagaatatattagataaatgtgtattggcctggaaaaggtatcatctaagtatgcttaatgattatccatcttaaaaaaaaaatacagaaatagggttgtagaacaagggtcctggtcatactgagcttacacttctgttgatgaaataaaacacatatgagatgatgaggaaataattcaaccaacaagaaaatactttacaaccaagagacttattaaataaaatgggtgcaccttttataataccaataagtataatagtaccctaacacagtagacacatttctgttgtctgtagttatctttcagaaagccgtcttgggagaacctttaaatgacctcagagagcgaaggtttatgtaaataaagaattaagtcagtgtgggtagaggttcagcaccagggtgcaggaagttatgtgaagattgtggtatggggctcatgtctagaaacagagagtggccccatgtcagcctatgagggaggagccaggccccacctcaagggtctccttcaggaagatctctgtgggaaaggagcaggggttccaggttttcagcaaagcctgtgcttgggcaatccatcaacacggttagtccagggcccacatataacctctgacccttctcacatttattttctctgtctggtacttcctctaaggagcatcctgccactcaccagcccctaccaaacacacacacacacacacacacacacacacacacacactcatactctatttgctcataatctcataatcatccatcaggttttaactgagatagtacttcttctgggaactttctctggtgagagatcctcttatgtggctcttgacctaccaaaccagaagcagttgtgcaattagtgatcattattctcttatttattatagtatctccagcacttagcacaatatctgcagacagtgggcacgcactgaaaaaaaaatactttttgaatcaatgaattaaatagctagttttcattcaccctaagaaaataccaaacattggtcttaagaatgtcacaggcctgaaggtataaaggaggaagcaaggaaacaaaatcaacagacagagccttggcaaaatctgctgttcaccagtcctcccagcaaatccatttcccattctggggaagcaatgccaaacagctccaggaactctgtacatggtctgtcaagtatccaagacagaagggagacttttcaagagtggaagcccagcctgcttgctccagtctggactgtgctggtctctattttcctagtcagggatggccccaacctgggactgtgtctcctctcaggctctgaggccttgggaatggaggaatgtcgtatctgccagtggtttaggtctgtattgtgaagaattaactttcccaaacagagatctggccttcaccctcagctgctgggtggtgattcctaggctcctggattgtcctgccagataggagtatctttgtttgcctgagggctttggccaccagtcagtctaataacgtgatatatgatggggctttggaacatgccatgtgaattctgacctctggaggaaccagagatcattagctagaacctccaggaggggctggaggttaaaggtcagccacgtgggcagcgtgtgataaagctccaggaaaaactctggacaccaaaggctcagttgagctcctatcttctgcaacactccatgagttctgtcacacaacatggctgggaggaggtaacacacccaggtctccctgggagaggacaaccagaagcttcatgtttagaaccctcccagatttcacccaatgcttctctccctttggttggttctgatttgtacccttttgctctaataaactatgatcatgatcactttcctgagttttgtgtgttgtttcatggaactatcaagcctgagggagcatgggaactcccagatttgtagccagctagccaggagtaaaggcagcctggggacccggaacttgtggctgatgtttgcattgagggcagtcctgtggaggactgtgcccttaacctgtgaagcatggccacctcccggcagttgctgtgagaactcattgcagggccactcagggaagtgtgggaaattgaaccaatgatgcctgacaccacggcttcctgactatcctctaggaagtctatcaggagatgcccctgttcacttccctgtaggttccagcgaggctcagagggtcatcagttctaccaacaatatctgcgcagaagagagtagctgtgattttattttagtctgaaagaacactgtttgttgttgattaacacctaaatattacaaacagtctctcagtgtgagaagatttatcttattctcctgtgtaattagaatgattattcaacaaatggatgttatctagcgaacttccagaaagaagccaaatttatcaacctcaccaactcacacatacagccagggatctatattcttgtgctctcagagaaggcatggagcttggactgacagcaaaagaccaacaaaacacccagaagccagtcaaaaatggcccaggctgcaggatccttgaaagacctgaaaacacacgaggaaaaggctgggaaatagtaatggtgagtggacctctgcggtctggagaggaaactactggttattttaggaaaaacattcccataatggggctcagggaaaaaagaaagtaatggtatccaggccttattctcagaagcattctcctccctgaatccagtatctgaggtaactgagcagcagataaaaatagcattttctcgaaacaaagcaaaacattaaaaaaaaaatagcctactgtctaagctttgtctcccagtggaactcaggaaccaagccagcttctccagctgtgcaccttggctgtgtgtctcagatggaacatttctgacttcattccctcctcctcccacgtcactcggtaaggagggtgggccaggacaagcagctcagacagctgttcctacagctggccttaccacaatcccccaggcctcacatacatgcacctctgggccctgcctgcctgcactaaaccatccggcccagtgcaacagaccattctttcaagctgtctctctcctactcacaaccatcccaggagtcctcttaaaactattttttcggagaacacattgtgctttgccacactgttccatttatctcttggtggccattccatttgcctcagcaactctctatcccattttttagtactacccctgaacgagaaggcaatcttgttcatcttgccaactctaaatccttatcgcaatcgtgttgctttagattgcattcatgtgtgaataggtgtggataggtgtttggcactgtgttagatgccaaagatacagtgctaaggaaaaaacatacctgacaacagattttattatattccaacgggaaagataggataaacagatacataaacaatgtatatgcagattaggatgagtatcatgaaagcaataaataagaggctgacgggttcaatttaagtggggtggccagaaaatgcttttccttcttctgagagaagtgagcgaggggcacagagaagtccgaattgttacactaatgaatatttctgagcttgaaaacacaaaacaaggggagatgaggttccactcaacagaggtatatacacatcaattacatgacccagaaaacctgattcagacacaccttgctgacactactccatagggaaggtcattttcacttgtccacatctaccacacctccattttcactctccctgagataagaggatgtgcatttacactgtgtctgcctagcgaaattgtaccccccgctgaataaagcacagttagttgagattcacgaacaccaagcctctctttataatgactttagagagctgtgctaactgaccagcactctggatacttatgagcagatgtctggtagcaatggaacctctcatgaccacccaggctctaaatgactgttcagctcagcagctcattatcaccttcctggagttagagctccaacataagaataaatatctccatctagtattatcactttttaaatcaaaatctatattcagcttgagagtataaatatcaaaatttcagggcattttttctaacttttcttgggagattttagtaaaattccagggcagattgctgaaagtacaatctgggaacagaaactaatatagtgtcacatcatatgaagttaacctctttttcttatgcaattctatcaaacttcaaggaaattctttggaaatctgggccccactacatttaaaacaaaataggtctatcatgaaatgcctaataaaggttgatcttacagtgtgatcgaggtgctatgcagatctgagacaggtggattattccagaatgagaaagaaacacaggatgaataagtcgcactaatggcaatagcaacttctgggaaacaccaatttctggcagctgttgctttcgtcaacactttctcagcaaaattgccacagccatttctgagagcttagaagcactgctaggaatctctaataggagtctgtttaatgggaattcctattgactacagccgcttttgcatataggagataatgttgagctaagggaatctttcaatgattcattcaaaacatgtttatccaccatgtgataaacattatagtcagtgccatagtataaacttgaataatgcataatccctgcccccagggaactcacatccttctcgacatgcctagcacaaacacacagaattataataaaagttgtcaagaagaagatatgggtggcgcattatgcaagcagagaaaaagggactgccttattcatttagaagctactggccctctctagagattgttggtcttccagtacatctaaatattcttcaatcgtaaaatgccatgaagctagaagtacaaaatgctgtattatcagttaagccccctatttttttcttttttttttttttttttgagacagagtctcattctgtcacccaggctggagtgcagtggcacgatctcacctcactgcaacctccacctcccaggttcaagcagttctcctgtcttagcctcccgagtagctaggtttacaggtgcatgccaccatacccagctaatttttgtatgattagtagagactgggtttcaccatgttggccaggctggtcttgaggtcttgaactcctgacctcaggtgatccgcccaccttggcctcccaaagtgctgggattatgggattacaggtgtgagccaccatgcccagccagttaagcctcttaaagaatgtcttgaattataacaaacacatgatgcctatcttcccccatatctttatactgacaaaattaggttcaaaatcaaggcatggtcaccagaaatcaggtcagagggatcaagaaaacatggacagtgaagtgatttcacttccatacaggtgataaatatttcctaaaatacaggtagatgtgtggcacaaaacctccagactctgagcatcaaagtccctcctaataccagaaaggaaggacccagcatttgtcatctcagtctcagacaaatacatactcagagggcctcaggaacatatgtaaactaaaaaaaaaaacatgagaaattgagcaggagcctgagtttgggcttccttgggtgggtactgtattaatttcccataacaaaatactatggaatagtacacagatgtttctttcctcacatttttggaggcaggaagtccatgattgaggtgtcagcaggcttggattctcctgaggcttctctccttggcttgtgaatggtcatcttctctctctctctcttcacttggtcttttctctgtgcacaggcatcctttgtatttctccctcttcttataaggacataaatcctactggattaggaccttacccttatgacctcatttaacctcagttaccactttaaaagccatatcttcaaatacagtcacattgggggctagggcttcagcatatgaattttaggaggacagaattcaatccataatagatggggacagggcaattctcttcctaggtaagccttcccttagggccatttacggggagataaacaaaccccaatttctactgagcaaaagctcagagaccctgaagtaactgcagttagtaaatgagaaagacagaatattttcaatatcttcaagtctaatacctagaagtgatagaggtttattcacattttctcccagtcattttcttattctgtgtttatacagcatttctgttaatgacaccattattttcagaaatcaaaatgaaatcttaatgttatcattgactctccccccttccttgccttcacttcaatcataattttccatgtctatgtaagtattcttttggctatttacatattcatcagaaacctatttcagctcttattaattttcatgaagatcactaatggaagccacctattgttcatgcttctagttcaggtgctcctaatatgggaactgtatagtttcagttgatctataacctttcaccccccaggttttgtggttgtttttatatacactttcacacatataagtggtaatgtgttcattgctattatcagttgttcaaagtgggtccctcacccacgaacaggttaaaagccagagctctcctctctcctactacacttgctccttgtaaaaaaaatttaatctttgtgattaacacaattgtttatattcttccccctactcaaatactcccagttacaaacattttaacttgtagtttaaaatcgttcctggtcagcaatcccttctgtagactcttccaaaaattaccatggttcttataatcaatctcacacccaaaagaggagattttagaaaggcatagacaccagaaggcagggatatatctgtctaccacagtccaccgtctggccaccaatgactcacattaccctcacttgcaaaaatacattcacatacatccccaaaggtctcaagaatcttatctcacagagcttcagctcaaagtcaaacttttatgctttaaatcatggctaagttcaaacacagctcctgggcataatatatgaagtacagctcctggggtataacttctctccttctgtcaacctgtaaaactaaagaggcaagtgatctgcccccagtacacccgtcatacaattttgaaacaggcataactggtaggcatgggataacagctatagacatattggttcaaagggaggaggggaaaaagataacaaagagtcgttggtccatagcagttctaaaatctagctgggcaaatgttgggagttcaatgattaggttttagagcctaagattaatctcggctattggggaaaccagcccccagtatttcaacgtaggttcttttctattttccctaagtgtcggccagtctgagaaataaagagaaagagaacaaaaaaaagaaattttacagctgggtctccggggttgacatcacatgttggcaggttccatgatgccccctgagcctcaaaaccagcacgtttttattatggatttcaaaaggaggggggggtgtatgaatagggtgtgtgtcacagagatcacatatgatcacatgcttcaagggcaataaaatagcacaaggcaaatgggcaggacaaggtcacaaggccagggcaaaattagaattacagatgaggttccctgtcccactgtgcacgtattgtcattgataaacatcttaacaggaaacggggttcaagagcagagaacaggtctgactagaatttcatcaggctggaatttcccaatcctaacaagcctaggggcgctgcaggagaccagggcttatttcataccttatctacaactgcataagacagacactcccagagcagccattttagaggcctccccctgggagtgcattcttttcccagggctgttccttgctgagaaaaagaattcagtgatatttctcttatttgcttttgcaagaagagaaatatgactctgttccacctggccccgcaggcagtcagactttatggttatcttccttgtttcctgaaaatcactgttatcctgttccttttctaggtgcccagatttcatatttttcaaacacacatgctctacaaacaagctgggcagataacacaatcattacaggatcctgaggcgacatacatcctcagtttatgaagatgatgggattaagagattaaagtaaagacaggcataggaaattgtaagagtattgattggggaagtgaaaaatgtccttgaaattgtcaccatttatgttcttctgccatggcttcagccggtccctccgtctggggtccctgacttcccacaacacttggctctaccctcttgcctcttagcaccaccctctatcatccttcttctttaatgtttgcagttgagtagttttatcagcctgcttcctgccagtagaaatgttggggtctgacagcctcctttcatttcattttgtagtctttctatccctttcagtccaagccagtagtgtttctgctgaaataattttctcaagatctttgtgcatctaccatagatttcaatgatgttctgaccatcagaaaaaaacacacccacagatcttttccagacagcatatatttttggctcctgctcggatggctgaggggctacagtttgattgagtggatctaaaaggcacattcttaatctccttaaggagtcctttgtgccattgaatattctcaccttttagtctttgaggtttttttaacttttattttgagttcaggagtacatgtgtaggtttgttataaaggtaaacttgtgtcatggggtttgttgttcagattttttcatcacccaggtattaagcctgggtgtacacattagttatttttcacgatcctctccctcctctcaccctccaccctcaagtaggctccagtgtctgttgttcccctctatgtccatgtgttctgtgttatcatttcgctcccacatataagtgagaaaatgctgtatttggttttctctttctgtgttaatttgctaaggataatgacctccagcttcatcaatgtccctgcaaagggcatgatctcattattttttatggctgtatagtatttcatggtttatatctatcacattttctttatccaatctgccattcctggccatttaggttgattccatgtctttgctattgtgaatagtgctgcaatgaacatatgcatacatgtgtctttatgatagaacgattattattcctttgggtatatacccagtaatgggattgctaagtcaaatggtagttctgtttttaggtctttgaggaacagccatgctgttgctcctaatggttgaactaacttacactcccaccaacagtgtaagtgttcctttttctccacaacctcaccagcacattattttttgactttttaacaatagccattctgactggtgtgagatggtagctcattgtggtttttatttgcatttctctaataatcaggaatgttgagctttttttcatatgcttggtggctgtatgtgtgtcttcttttgaaaagtgtctgttcgtgtcctttgcccactttttaatggatttttttcttgtaaatttgtttaagttccttatagatgctgcatattagacctttgtcagatgcatagtttgcaaatattttctcccattctgtaagttgtctttttagtctgctgatagtttcttttgctgtgcagaagttctttagtttaattagatcccatttgtcaaattttgcttttgttgcaattgcttttgatgtctttgccataaaatctttgcctattcctatgtacagagtggtattgcctaggttgtcttccagggttttttttataattttgggtctttaatccagcttgagttgattttttttgtacatgatgtaaggaaggagtccagtttcaatcatctgtatatggctagccagttatcccagcaccatttattgaatagagagtcttccccattgcttgtttttgccagctttgttgaagatcaggtagttgtagccttatttctgggctctctattctgtttcattggtctatgtgtctgtttctgtaccagtaccacgctgtttttgttagtgtagccctgcagtatactttgaagtcaggtagcatgatgcctccagctttgttctttttgcttaggattgccttggctatttgggctcttttttttttccatatcagttttaaaatagtttttctctaattctgtgaagagtgtcattggtagtttgataggaatagcattgaatctataaattgctttgggccgtatggccattttaacaatattgattcttcctgtccctgagcacgggatatttttccatttgtctgtgtcatctctcgtttctttgagcagtgttttgcagttctgcttggagagatctttcacctccctggttagttgcattcctaggtattttattctttttgtggccattgtgaatgggattgggttcctgatttggctctcagcttgactgttattgctgtatagaaatggcagtgatttttttatgttgattttgtatcctgagattttgctgaagttgtttatcagttgaaggagctttggggccaagtctatgggtttttctagatatagaatcatgtcgtctgcaaagaaggataatttgactttctctcttcctatttggatgcaatttaatactttctcttgcttgattgctctagcaatctctttggcctgaaagccccctgaggacaaatacatcagtcaactgtttctttgtttgttgtttgttgtttcttttaaattattctcattacttagcacagatcatgtacaccatgagtgtttaataatatcaatagaatatttgggagcaggaggttattttgcttagttttatgctttcactgttgttgtagaacagctgggctagaagacattattaaacataaatacaactggtaaaatatcccagcagaagaaatgctttaaaaatatctccaatcactgcaggagtgcagagaggcaacaactcctccagcttttgcacatcgaataattggtttagttcactccttccacatcacttggagcagcggggagggtggggaaagcttaatgaccaggaaagcctttcataaagtcatcatcaatgttctttataacctaatgtcacttcaatagtccatggttttcaaataaatgtcctacctgcccacagactgaaattttagccaaataaatccataaatttaaacatattgacaatcaaaatggtaaaaagaacttttatttttaacttgtaaaaatggttttagaggtcatcaggaagaataaatgagatacatagccaaaaaaaatttaaatacttgccacatcagatattagaatgtgttctaaagctacgctaattaaaataatgaggtaccaatacaggaataggtaggtagagcaatagaagcattaagtataaacttataagagactcaagttataagttacaagaatttgacatatgttaaagttagcatctcaagccagaacagcatgtcaataaattgttgaaagacacctggataaccatcaggaaaacaattaaattagatccctacctcaacaactaaattccaaaggaaaaagactcataacatttttaattaaaaagcactggaagaatatatagatgaccttttacataactttgaaaaaggagaattatgttataaaaatcacaacaaaggcagaaattataaaagataaaattgacagatttgactaaatacatctttaaacatgtgaatattaaaacgctgtaaaaaattaaaagacaaataaagtagaaattatctaaaatatatatcaaagcaaaaactgcatttctatatgccactggtatataaaaatacttccaaatcagtaaatacaaattgcacacaaatagaaaatgatagaagaagctaacaggcatttcacaaaagaagattataaatgactgataaacacattaaaatgtctattactacataattaaagtaattctgaaaccaataaagtacttttttctgcataattctagggatttatgcttaggaaagaatttgtaataaagatccacacacaaagatatctatcagaatgtagtatataacaccacaaatcataaatgagtcaggtatggtggctcatgcctgtaatcctagaactttgggaggccgaggtgggaggaccacttgcagacaggagcgcaagacctgcctgggcaacataatgagatgctgtctcaaaaattttttaaaaagaaacaatttaggggggcggttccaagatggccaaataggaacagctccagtctgcagctcccagcatgagcgatgcagaagacaggtgatttctgcatttccaactgaggtatcgggttcatctcactggggcttgtaggacactgggtgcaggacagtgggtgcagcctatcgagcatgagccaaagaagggcgaggcattgcctcacccaggaagtgcaaggggtcagggaattcccgttcctagccaagggaagatgtgacagatggcacctggaaaattgggtcactcccaccctaatactgcacttctccaatggtctcagcaaatggcaccccaggagattacatcccgcacctggctcagagggtcccacgcccacggagccttgctcattgctagcacagcagtctgagatcaaactgcaaggctgcagtgaggctgggggaggggtgcctgccattgctgaggcttgagtaggtaaacaaagcagccaggaagcttgatctgggtggagcccaccccagctcaaggaggcctgcctgcctctgtagactccaccttggggggcagggcatagcaaaacaaaaggcagcagaaacctctgcagacttaaatgtccctgtctgacagctttgaagaggatagtggttctcccagcaaggagtttcagatccgagaatggacagactgcctcctcaagtgggtccctgacccccgagtagcctaactgggaggcatccaccagtaggggcagactgacacctcacatggccgggtacccctctgagatgaagcttccagaggaacaagcagcagcaacatttgctgttcagcaatattcactgttctgcagcctccgctgcagatacccaggaaaacagagtatggaatggacctccagcaaagtccaacagacctgcagctgaggatcctcacgttagaaggaaaactaacaaacagaaaggacgtccacaccaaaaccccatctgtacatcaccatcatcaaagaccaaaggtagataaaaccacaaagatggggaaaaaacagagtagaaaagctgaaaattctaaaaattggagggcctctccccctccaaaggaatgcagctccttgccagcaacagagcaaagctggatggagaatgactttgacgagttgagagaagaaggtttcagatgatcaaacttctctgagctaaaggaggaagtgtgaacccattgtaaagaagctaaaaaccttgaaaaaagattagatgaatggctaactagaataaccagtgtagagaagtccttaaatgacctgatggaactgaaaaccatagcacgagaactacgtgacaaatgcactagcttcagtagccaatttgatcaagtggaagaaagggtatcagtgattgaagatcatgaagtgaagcaagaagagaagtttagagaaaaaagagtaaaaagaaatgaacaaagcctccaagaaatatgggactatgtgaaaagacaaaatctacgtctgattggtgtacgtgaaagtgacagggagaatggaaccaagttggaaaacactctgcaggatactatccaggagaacttccccaacctagcaaggcaggccaacattcaaattcaggaaatacagagaatgccacagagatactcctcaagaagagcaactccaagacacataattgtcagattcaccaaattgaaatgaaggaaaaaatattaagggcagccagagagaaacgtcaggttacccacaaagggaagcccatcagactaacagcagatctctcagcagcaactctacaagccagaagagagtgggggccaatattcaacattcttaaagaaaggaattttcaacccagaatttcatatccagacaaaccaagcttcacaagtgaaggagaaataaaatcctttacagacaagcaaatgctgagagattttgtcaccactagtcctgccctacaagagctcctgaaggaagcactaaacatggaaaggaacaaccagtaccagccactacaaaaacatgccaaatcgtaaagaccatagatgctaggaagaaactgcatcaactaatgagcaaaataaccagctaagaacataatgacaggatcaaattcacacaatattaaccttaaatgtaaatggactaaatgctcaaattaaaagacacagactgtattcaggagacccatgtcacgtgcagagacacacataggctcaaaataaaggaatggaggaagatctaccaagcaaatggaaaacaaaaaaaggcaggggttgcaatcctagtctctgataaaacagactttaaaccaacaaagatcaaaagagacaaagaaggccattacataatggtaaagggatcaattcaacaagaagagctaactatcctaaatatatatgcacccaatacaggagcagccagattcataaagcaagtccttagagacctacaaagagacttggattcccacccaataataatgggagactttaacaccccactgtcaacattagactgatcaatgagacagaaagttaacaaggatatccaggaattgaactcagctctgcaccaagtggacctaatagacatctacagaactctccaccccaaatcaacagaatatacattcttctcagcaacacattgcacttattccaaaattgaccacatagttggaagtaaagcactcctcagcaaatgtaaaagaacagaaattatagcaaactgtctcttagaccacagtgcaatcaaactagaactcaggattaagaaactcactcaaaaccgctcaactacatggaaactgaacaacctgctcctgaatgactactgggtacataacgaaatgaaggcagaaataaagatgttctttgaaaccaacgagaacaaagacacaacatgccagaatctttgggacacacttaaagcagtgtaaagcagtgtgtagagggaaatttatagcaataaatgtccacaagaaaaagcagaaagatctaaaattgacaccctaacatcacaattgaaataactagagaagcaagagcaaacacattcaaaagctagcagaaggcaagaaataactaagatcagagcaaaactgaaggagatagagacacaaaaaacccttcaaaaaatcaatgaatccaggagctggttttttgaaaagatcaacaaaattgatagactgctagcaagactaataaagaaaaaaagagagaagaatcaaatagatgcaataaaaaatgataaagaggataccaccaccaatcccacagaaatacaaactaccgtcagagaatactataaacacctctacacaaataaactagaaaatctagaagaaattgataaattccttgacacatacaccctcccaagactaaaccaggaagaagttgaatccctgaatagaccaataacaggctctgaaattgaggcaataattaatagcctaccaaccaaaaaaagtccaggaccagatggattcacagccaaattctaccagaggcacaaggaggaactggtaccattccttctgaaactattccaataaatagaaaaagaaggaatcctccctaactcattttatgaggccagcgtcatcctgataccaaagcctgacagagacacaacaaaaaaagagaattttagaccaatatccctgatgaacatcgatgcaaaaatcctcaataaaatactggcaaaccgaatccagcagcacatcaaaagcttatccaccatgatcaagtgggcttcatccctgggatgcaaggctggttcaacatacacaaatcaataaatgtaatccagcatataaacagaaccaaagacaaaaaccacatgatttttgtctcaatagatgcagaaaaggcccttgacaaaattcaacagcgcttcatgctaaaaactctcagtaaattaggtattgatgggacatatctcaaaataataagagctatttatgacaaacccacagccagtatcatactgaatgggcaaaaactggaagcattccctttgaacactggcacaagacagggatgccctctctcaccactcctattcaacacagtgttggaagttctggccagggcaatcaggcaggagaaagaaataaagcgtattcaattagaacaagaggaagtcaaattgtccctgtttgcagacgacatgattgtatatctagaaaaccccattgtctcagcccaaaatctccttaagctcataagcaacttcagcaaagtctcaggatacaaaatcaatgtgcaaaaatcacaaacattcttatacaccaataacagacaaacagagagccaaatcatgagtggactcccattcacaattgcttcaaagagaataaaatacctaggaatccaacttacaagggatgtgaaggacctctgcaaggacaactacaaaccactgctcaatgaaataaaagaggacacaaacaaatggaagaacattccgtgctcatggataggaagaatcaatattgtgaaaatggccatactgcccaaggtaatttatagatataatgccattcacatcaagctaccaatgactttcttcacagaattggaaaaaactactttaaagttcatatggaaccaaaaaagagcccacattgccaagacaatcctaagccaaaagaacaaagctggaggcatcacgctacctgacttgaaactatactacaaggctacagtaaccaaaacagcatggtactggtactaaaacagagatatagaccaataacagaacagagccctcagaaataataccacatatctacaaccatctgatctttgacaaacctgacaaaaacaagaaatggggaaaggattccctatttaataaatggtgctgggaaaactggctagccatatgtagaaagctgaaactggatcccttccttacaccttatacaaaaattaattcaagatggattaaagacttaaatattagatctaaaactataaaaaccctagaagaaaacctaggcaataccattcagggcataggcatgggcaaggacttcatgtctaaaatgccaaaagcaatggcaacaaaaggcaaaattgacaaatgggatctaattaaactaaagagcttctgcacagcaaaagaaactaccatcagagtgaacaggcaacctacagaatgggagaaaatttttgcaatctactcatctgacaaggtctaatatccagaatctacaatgaactcaaacaaatttacaagaaaaaagaaaaaacaaccccatcaaaaagtgggcaaaggatatgaacagacatttctcaaaagaagacatttatgcagccaatagacacatgaaagaatgctcatcatcactggccatctgagaaatgcaaatcaaaaccacaatgagataccatctcacaccaattagaatggcgatcattaaaaagtcaggaaaaaacaggtgctggagaggatgtgcactgttggcgggactgtaaactgattcaaccattggggaagacagtgtggcgattcctcaaggatctagaactagaaataccatttgactcagtcatcccattactgggtatatacccaaagcattataaatcatgatgctataaagacacatgcacatgtatgtttattgtggcactattcacaatagcaaaggtttggaaccaacccaaatgtccatcaatgatagactggattaagaaaatgtggcacatatacaccatggaatactatgcagccataaaaaacgatgagttcgtgtgctttttagggacatggatgaagctggaaaccatcattctcagcaaactatcgcagggacaaaaaaccaaagaccgcatgttctcactcataggtgggaattgaacaatgagaacacttggacacaggaaggggaaggggaacatcacacactgtggcctgttgtggggtggggggaggggagagggatagcattaggagatatacctaatgtaaatgatgagttaatgggtgcagcacaccaacatggcacatgtattcatatgtaacaaacctgcacattgtgcacatgtaccctagaacttaaagtataaaaaaaaatgaaggaaggaaaacaaaaaacgcaaataaataaataaataaataaacagtttaggccgggcacagttgctcacacctgtaatcccagcactctgggaggccgaggtggccagatctcctgaggtcaagagttggagaccagcctggacaacatggcgaaacgctgtctctactaaaaaatacaaaaattagctgggcatggtgtcatgtgcctgtaatcccagctattcaggaggctgaggctggagaatcacttgaactctggaggtagaggttgcagtgagctgagatcatgccactgcactccagcttgggtgacagagcaggaatccatctcaaaaaataaaaatagaaaaataaaaataaaataaaaattaaaaataaacagtttaaacgtccaacactagtgacttggtaaaataaaatttagtacatccacataatgtaatgctattgtcaaatgaagttatttatggatatttgttgacatgaagaaatgtttgtgaatcataatatattagtcagttgaaagaaagttgctgacattataaactgatgtttggctaaattataagtacagatgcacgcatatagtactatgggtatataacagggttagtatatatatatgtatatatgtgtatgtgtgtgtgtatatatatatatagtgtgtgtgtatatgtatatatatagtgtatatatatacacacatatatgtgtgtatatatagtgtatatatatagtgtatatatgtgtatatagtgtatatatatacacacatatgtgtatatatatgtgtatatatatacacatatatgagtgtgtgtgtgtgtgtgtgtgtgtgtatttatatatatgctttcttgctctgccagctgaaaagcaataacaccccagtagcaacaagcatggctaggtaccagaactcgctttgtaatcccattttccaagaaaataaatcagagctctctggagaaatgtctgattctagggctgggacaaggaatatacaagataggtctggagaaagttacagtgccagaaagtaagcaagtgctcaaaaacaaagaaaaaaactcacaatgatgggagtatgtaaaaaggaggtaagagccaattggaaacgttccgtttggctaaagccagaacaattggagcaataaaataaagtagtactgagtaataatccaaggtgtaaaacaaatatcgtgtgtcaatactgatataaataaatgattgaataaataaatggggagaatagacaaatctcccatgcagaagaattccaaataatttacttggagcataaagtgatagaatgtaactccctcctcaagtgtgggccatacacagtgatgtccttccaaagagcacagtatggaaaggggtaagaaagagcaactttacagtggtaaaatctgacaaacatggcctcagtcaagtgatcaaggttgacgtcaacagtagtaagtcacgttgacagtatgaaccttgatatggtgtgaggagaaatggcatgctacctatggcgtcttcttcccaaaaatgtataacctcagtgtaatcatgaggacatcatcagacaaatcccaattgagggaaattctacaaaatactgaaagggagctctttaaactgttaaggtcatcaaaaacaaggaaactctgagaaattgttacaaccaaaaggagtctaaaaagacaggattaaatgtaatgtggtatcctggctagaattctggaacaaaaaaaaaattaggtaaaattgaagtaaatctaataaagtatgaactttagttaataacaatgtatcgatattggtccattaactatggcatgtgctgctgtaagaagttaataagaagccacactggatagggatttatgagaactctgtgtactctcttcacaacctgcccacaaatccaaactattccaaaattaaatttcttcttttaaaactaagtttcatatgacttgatttttgttaagggaggattacaattttatgtatagctgtgtcattatagatatagctatagacatggatatagatatatagatatatagaaatatagaaaagcatttagctgtgctgtctaatacacagccattacctagatatagctattgaacacttggattgtggctaatccaaattgagaagtgctgtaagtgtgaaatgtacaacagatttcaaagatgtaatatgaagaaaagaatataaacaatatcattaatgttgtgttttgagacagggtctcattcttttgtccaggctgaagtgaagtagtgcgatcacagatcactacagcctcgacctcccaggctcaagcaatcctcccacctcagtctcccaagtagatggaactaaaagtgtgcactgccacacctaatttttccatttttatttattttttatttctaggtttactcaaaaacattattactcaattcataaaatagtaattcagttagctggtgcctaaagactgaaaaaattgtaattttccaggcatttacagtttggggaacaaaaaacatgagacctacttgaaaaaatagaggctaataaataattaaggataaggctctaaaaaataacagtattgcaagctatttttaaagagaaaaatttgatagcaaaatgtttctctgactttgtaaatgcacaagaaagatcaacagttttatcacttgcagaaaaggcaattaatgtaatagaaaatgtgatgataaacttctaagaaactaagtgcttatgtctatttaacaatagaagttttacctattaccatttactattcatgtgtcgacagcaatccccttctctcccaactaggcctttcacaattatggaatatagacataaaatattattcctagatacattttacaaaataaaaatgagtaaatggaaaaaaggcaagttaaagtagttatatatatatattgaaaagtgggtgaataaactgaattactttcactaaaatgactatacaatagttaatgtatttcttatttatacaaggggaaaactggatataatatatctttaacattacacagtcatagaaaaatgttaactttaacctgataaaatcctttccccacatgttttacactttggattttctttcaatgtttattttggatccagagggtacatgttcatgtttgttacatggatgtattgcatggtgctgaggattggggtatggataatcccatcacccaggtagtgagcatagtacccaatgagtaaattgttaccccatgacccaccccaccctctaggagtccccaatgtctattattcccatctttttatccatatgtactcagtgtgtagctctcacttgtaggtgagaacatgtggtatttggttttccattcctgcatatattcacttaggatgataacctccagctgcatccatgttactgattttgttctttttaatggatgtgtagtattccatggtgtatatgtaccacttttttctatccagtgtaccattgatgggcccctaggttgattccatgtcttagctattgtgaacagtgctgcaataagcatatgagtacatgtctctttttggtataatggtttcttttccttggggcatgtacctaggaatgggactgctgggtggaatggtagttctgttacaaattatccaagcagagatctccagactgctttccacagtggctgaactaacttgcattcccaccaacagtgtataaacataccattttctatgtagccttaccagcagttgttatttcttgactttttaataatagccattctgactggtgtgagatggtatctcattgtggttttgatttgtgtttctcttatgattagcaatgatgagcattttttcacatgtttgttgactgcttgtatgtcttcttctaagaggtgtctgttcatgtcttttgcccatttcttaattggattgtttgggtttttcttgctgatttgtttaagttatttttcctattcagatgacttttatttctttctctagcctgattgctctggctaagacattcagtactgaatgttgaataggagtggcaagagtaggcacccttatcttgttccagttctcaaggggaatggttccagcttttaaacattgagtatattgctggctataagtttgtcatagatggctcttgttattttgaagtatgtaccttcaacgcttagttttttgaggatttttatcatgaagcaatgttggattttatcaaaagcttcttctgcatcaactgagatgacatatggttcttgtttttaattatgtttatgtggtgaatcacatttattatttatatatgttgaatgttgaaccaaccttgcagcccatcaataaagcctacttgatcatagcgaattaacttttttatgtcacgctggcttcggtttgctattaacagtattttttttttagatggagtctcactctgttggccaggctggagtgcagtgttgcaatctcagctcactacaacctcagcctcctgggttcaagagattctcctgcctcatggagtacagtggtgcaatctcagctcactacaacctctgcctcctgggttcaagcaattctcccacctcagcctcctgggtagctgggattacaggtgcacaccaccctgcatggctaacttttgtatttttaatagagacagggtttcaccatgttggccaggctagtctcgaacatctgacctcatatgatccacccatctcagcctcccaaagtgctgagattacaggtgtgagccacctcacccagccagcagtttgctagtattttgttcaggatttttgtgtctattttcatcagggatattggcccgaagttttctttttttgttatgtctctgccagattttgttatcaaattaatgctaccttcatagaatgagttaaggagaagcccttcctccttggttttttggaataacttcagtgggattggtaccagttctttatatatctggtagaattcaggggtgaatccatctaatcaagggctttttttgttggtggtggtggtttttttttattactaattcaattttggtacttgttattggtctattcaggctttcactttcttcctggttcaatcttgggagtttgtgtgtttccaggaatttatcgatttcctctaaattttctaatttgtgggcatagaggtgtttgtaatagtctctaaagatcttttgtatttctgtgggatgagctgtaatgtcatctttgtcatttctgattgcacttatttggatcttcacccttttacaaatttcttaatctacctagaagtctatcaatctttgtttattctttcagaaaatcaactctcagtttcattgttcttttgtatagattgtatgtctcaatttccttatgttcttctcagattttagttatttctattcttctgctagctttactgttggtttgttcttatttttccagttcctctaggtgcaatgttagattgtaaatttgggatatttctagcttcttgatgaagacgtttagcactagaaactttcctcttaacactgctttagccgcatcccaaagattttggtaagttgtatctcttattttcactaatttcaaagattttttaaatttctgtcttaatttcatttttcacccaagagttattcaggaaaaagttgtttgattttcatgtttatgtgtagttttaagagatcttcttggtattgatttctatttttattgcattgcaatctaagagtgtgctcggtatgattttgatttttttaaatttattgagactcgctttgcaaccaagcatgtggttgatcttagaatatgtacctgtgtggatgagaagaatgtctattctgtggttgttaggtggagcattctatagatgtctactaggtccaattggtttagtgtcacgtttaaatccagaatttctttatcagttttctgccttgatgatctgtctagtggtgtcagtaaggtgttaaaataccccactattagggtgtagctgtctacaccttgatcttttcatagatcaagaagaacttgttttatgaatttgggtgctccaatgatgagtgcttatatatatttaagatagctaagtattcttgtttaattgaaccttttatcattatgtaatacccttctttatctttcctgaatgtttttggtttaaactctgttttatctgatataagaatagtgactcctgctcttttctgttctccatttgtgtggtacattttttcccatccctttactttgagcatgtgagtgtagttacacgtgagcttggtctcttgaagacatcagaaaattgggtcttgagtttttatctagcttgtcactctgtgtctattaagtggggcacttagaccattttacatactgaattagtattgatatgtgggattttaatcctgtcattgggttgataattggttgttttataaacttgattgtgtaattcctttatattgtctgtgagctatgtgcttagtatgtttttgtcataacaggtattaatctctcatttccatgtttagcattcccttaaggacttctcataaggttggtctggtggtaacaaattcccttagagtttccttctgtgttaaggattttacttcttcttcacttatgaagcttagtttggtgagatatgaaattcttggttggaatttatttgctttgaggatgctgaaaataggtctccaatttcttttggcttgtaaactttctgctgaaaagtctgctgatagtgttgtgggattccagttataagtgacctgacctttctctctagttgtctataatattttttcttttgcattgaccttggtgaatctgatgactatgtgccttggggatgatcatcttgtatagtattttgctgggttctctgtgtttcttgaatttgtatgtcaatctctctaacaagattggggaaattttcatagattatgtcctcaaatatgttttccaagttgcttactctctctctttctctctcaagaatgccaataaattgtagacttgatctctttacacaatcccatatctctcagaggttttgttctttttttaacattcttttttctttatttttttctgactgagttgatttaaagaacaagtcttcaaactctgagattctctactcagtttggtctattctgctgttaatgcttctgattgtatgtggaaactcttgtagtaaatttttcaattccaggagttcagtttagttctttcttaaaatggctattttgtctttcagctcttagatcattttaccggattctttggatttcttggattgcatttcaactttttcctggatctcagtgagcttctcaccatccaggttctaaattctatacctatcacttcagtcatttcagtctggttaagaaccattgctgggggctactgtgctcatttggaggtaaggagacatcctggctttttgaattgccagagttcttatgctgattctttctcatctgagagggctagtgtttctttaagttgagtatagtcagttggcttcatttctgggtgctttcagagggccaaggctctgtacaggatctttatttgtagctgaattcttgtcttaggtttcacaggcactgtacattggcaaaatattttggcagttgtaatttggactgtgatgcagtagatggtgtttaagagtgatgaccaacagataggctcttattcagccatgcagctcttttgtatttcaccatgttctcaatagtgctctgtggtggggtaaggcagagagataactccctcaccaggttcactcctgggccttggaggagccccctccaatcactggggtcatgcccaagtttcctttgttaggtgttctgggctgtggggctccctcagatagaggtcatggctggcagacaggccacttccttcccagaccagccctgtggagagaggcaccccactttcatgctggtccatgaaccagggcatctcaaccctctcagtgttttgagagtgagaacatttcccccactcaggcaccaccaagccagtgagtcttgcctatctaagtacagaaggaccatggaggtcgcatggtcagccatcagggtctccattttttgtggggacagaatcttactatggtgctcaggctgactgtatgttgaaatgacaatattttaggtatattgggttaagtgaaaataattttatatatttatttatgatttcctttaatgtagtcactaaacattgttaaattatatatgtggttcatattgtatttctactgatagcagttgtttaaaaggatagacatgagaatgttaacaatagctattcctagtagtaaagtgtaatttttagcttttcttttttctaatttttcttgaataaatatgtgttccttgtgtaattttaaaagtaataaaggtaaaaatacacaatgaactactgctgtgaaatataccactaacagaagtactaagcagaaatgtcaagtcttagagtcctaattatttattcatttaaatacatatatattaagtgtctcatgtgcaaggcatttggacagttgctaggaaaataaacacaaaaaaagatgagctataattattttcttcaaggggttcacagtccattttggaagttaggctcatgaatagaatattagagtacaatgcggtcagtgatactatggtgatttgtattaactctcctccccttctgctttaaatgttgctgtttttctggctctaaccttagtctacttctctgcccacaacacaattgcaactaacacctatatactaatggctatggctttaactttgactttgcttcagatctctacatccaactgtcttttggtcagatggccattgggcaacctaaactgtatgcctaaaacccatcatctcttcacctcccctgctccagactcttctacctccgtaattcttgtctttgttaatgatgccaccatttaaccagttgcctcatgactctgtaaaaaggaaatttagttactttacttcacttctcaaaattcttcaggcttggcagtgcacaagcctacatatgcccttagctaccaatccaacttcatctcctggaacacttctcatcagcattgacactctagaaataccaaactaccaaactcaggaaacatcacaagttatcacttctcttcctttcattgttgcgtgtgtccttccctctgcttgaagtgtccaacctcatcaccacctcttcttcatggttcctagacattcctctctgatacctcccttgatcttccaggcaaattaggctctcttctctctggctccccttgaactttgtacatacctccaacatagtgattttcccattatattataataccagctttctgtatgatactctattccctaaggacagagattgtatctcattaaccttggtatcctcagcgtcacacggaatgtgacagacagaaaactttcaagtttactgaatatttcctatctttctttaccttttccactctattgtggtcactcttaccctagaataatgtagatgttccttgaataccaaccaggcttcacttctgggtctttgttcttgaatggccttaccccagatggttccctctgataaaccaattagtcactgctcagaagtcacctcatcagagaggtttttccttcaatcctgtataatatagtgcctggcaagaaaaggatgccctctctcaccactcctattcaacatagtattggaagttctcaatcaggcaagagaaagaataaagggtattcaaacaggaaaagagtaagtcaaattgtctctgtttgcagatgacatgattgtatatttagaaaaccccatcgtctcagcccaaaatctccttaagctgataagcaacttcagcaaagactcaggatagaaaatcaatgtgcaaaaatcacaagaattcctatacaccaattatagacaaacagagagccaaatcatgagtgaactcccattcacaattgctacaaagagaataaaatacctaggaatacaacttacaagggatgtgaaggacctcttcaaggagaactacaaaccactgctcaaggaaataagagaggacacaaacaaatggaaaaacattccatgctcatggataggaagaatcaatatcataaaaatgaccatactgcccaaagtaatttatagattcaatgctattcccatcaagctaccattgactttcttcacagaattagaaaaaactactttaaatttcatatagaaccaaaacagagcccatatagccaagacaatcctaagcaaaaaaaaaaaaaaaaaaaaaagaaacaaagctggaggcatcacactacctgacttcaaactacactacaagcccacagttaccaaaacagcatggtactggtacaaaaacagatatagagaccaatggaacagaacggaggcctcagaaataacaccacacatctgcaaacatctttgacaaacctgacaagaacaagcaatggggaaaggattccctatttaataaatggtgttgggaaaactggctagccatatgtagaaagctgaaactggaccccttccttacaacttatacaaaaattaactcaagatggattaaagacttaaatgtaagacctaaaaccataaaaccctagaagaaaacctaggcaataccattcaggacataggcatgggcaaagacttcatgactaaaacaccaaaagcaagggcaacagaagccaaaattgacaaatgggatctaactaagctaaagagcttctgcacagcaaaagaaactatcatcagagtgaacaggcaacctacagaatgggagaaagtttttgcaatctatccatctgacaaagggctaatatccagaatctacaaagaacttaaacaaatttacaagaaaaaaacaaccccatcaaaaagtggacgaaggatataaacagacacttttcaaaataagacatttatgcagccaacaaacatgaaaaaaagctcatcatcactggtcattagagaaatgcaaatcagccagagtgagataccatctcccacaagttagaatggtgatcattaaaaagtcaggaaacaacagatgctggagaggatgtggagaaacaggaatgcttttacactgttggtaggagtgtaaattagttcaaccattgtggaagacagtgtggcaactcctcaaggatctagaactagaagtaccatttgacccagcaatcccattactgggtatacacccaaaggattatgaatcattctactataaagacacatgaacacatatgtgtattgtggcactattcacaatagcaaagatttggaaccaacccaaatgtccatccatgatagactggataaagaaaatttgcacatatacacgatggaatactgcgcagctataaaaaaggatgagctcatgtcctttgcagggacatgaatgaagctggaaaccatcattctcagcaaattatcacaagaacagaaaaccaaatactacatgttctcactcataagtgggagttgaacaaggagaacacatggacacagggagcggaacatcacacaccggggcctgtctgggggtcagtggactaggggagggatggcattaggagaaatacctaatgtaggtgacgggttgatgggtgcagcaaacaatcatggcacgtgtatacctatgtaacaaaactgcacgttctgcacacgtaccccagaacttaaagtatatatatatatatatatatatatatatatagtgtgtgtgtgtgtgtgtgtgtgtatttaaaaaaagatactttcctaattaaagatagtttcctaccttgaaaaatctctaatgccagctactaaagtaacaatttctcacttatccacaggggttatttctggccagtgagatgatgaatgactgttttatgttaatttttaattttatagtattctcatgggattaaaataattccgctaaccacaaaaaaaaaaaaaatcaggaaacaacagatgctggagagaatgtggagaaacaggaacagttttacactgttggtgggagtgtaaattagttcaaccattgtggaagacggtgtggcaattcttcaaggatctagaaccagaaataccatttgacccagtaatcccattattgggtagatatccaaaggattataaatcattgtactataaagacacatgcacgcgtaagtttattacagcactattcacaatagcaaagacttggaaccaactcaaatgcccatcagtgatagactggataaagataatgtgccatatatacatcatggaatactatgcagccataaaaaggaatgagttaatgtcctttgcagggacatggatgaagctggaaaccatcattctcagcaaactaacacaagaacagaaaaccaaacaccacatgttctcactcataagtgagagttgaacaatgagaatatattggcacacggagggaatatcacacaccagggcctgtcggggggttgggggctggggagggatagcattaggagaaatacctaatgtagacaaggggttgatgggtgcagcaaaccaccgtggcacacctatacctatgtaacaaacctgcatgttctgcacatgtatccaataacaaagtataatataaaaataaattaaaatttatattttatatatattgaaattatttatatattttgaaatatattatatatatttatatataaatatatattatatatatatatataaatatatattatatatatttatatataatatatataatatatatttatatataaatatatattatatatatttatatataaaatatatattttatatattccaccagaatataagcatcaactgggatctaattaaactaaaaacttctgcacagccaaagaaataatcagcagagtaaacagacaacccacagagtgggagaaaatatttacaaactatgcatctgacaaaggactaacatccaaaatctacagggaactcaaacaaatcagcaagaaaaaacaaataattccaaccaaaagtgggttaaggacatgaatagacaattctcaaaagaagatatacaaatggccaacaaacatatgaaaaaaaatgctcaatataactaattatcagggaaatgcaaatcaaaaccataatgtgataccaccttactcctcctacaatatggctataatttttttaaaaatccaaaaatcaaagatgttggcatggatgtggtgaaagagaacaattttacactgttggtgggaatggaaacctatggaaaacagtgtggagattcctcaaagaactaaaagtagatctaccatttgatccagcaagcctgctcctcagtatctacccagaggaaaacaggtcattatacaaaaaatacacttgtgcatgcatgtttatagcagcacaattcacaactgcaaaaatatgggaccagcctaaatgcccatcaaccaacgagtggataaagaaaatgtatacacatatataccatggaatactactcagccataaaaaagaatgaaataatggcattcacagcaacctggatgaagctggagaccatcattctaagtgaattaactcaggaatggaaaaccaaatattgtatattctcacctataaaagtgggatttaagctatgaggatacaaaggcataaaaatgatataatggactctggagactcaggggagaacgggtgcaccaaaatctcagaaatcaccctaaagaatggacccatgtaacaaaaacctcttgttccccaaaaaattattgaactaaaataaaataaaagtcattttttataaaagaatctaagtatcaaaaagcccaggactttgtctgaattattcaacaaatgaataaagatctgatacatgtataaataagtaaatgatgttatttatcacctaaatatgacactgtctctctgactttaattttcctttcatctgcttatttttcttcccaagccatgaatatgggacaaaaaaaagggattaagacacaaacaccaagaattggcaagtataatgaggctgaacttgaaaaataacaatagttcaggtaaccatatattaaatttgtctcaagaatttattttattttctcattcatttattcaacaaatatttacatcacgcctattatgagttctttttgaaaatgcaataactgtctcttacatttgtaccattgtttatagtttacaaggtcctttctgatacttattttaacgtatcctcataaacaattctttgaggtaagcaggtcttatgaggaatgagtcttatgaggaatgagttaccagattaaggatcattgggttgtaaaaatcttgagctagaaagcattccatcgttttattgttgatacaactatatacagaagcccattatcaatctatttatttcaccacagagagctataatacacccattgaccatcagtaccagtatattaattttcacttctgggatttccagcctactcttagcttcaatgttagtgtgaatatttcatggtagaatgcacaaactttgaggaaggtgcaatgctttccctgtttcttccacttatgttcaggttctgcacatactgtatgttctccataaatatttattggtgaagagaacagttattaatgtaagaatctctctattcagaaaatatccaaggaaactgtgatagctgctggtttccaaagatggtcttccaatgaactatgtctctcagtattcggaattttgcataattccttccccttgatctggactggctctgtgacttgattataaccaacagaacatggtggtgggttaagcaatactcatttcatagggggcatttctggtcacatgatacttaatggtccatggtcaaatactaggatccagcaaagagccaagagctgtttctcaaaaaaaaaaaaaaaaaaaaagaaaaagaaaaagaaaaaaaaagaaaaaagaaaaaaaaagttatctgcagagtatggcatggctttgctcccagattctaaaagtctgttctggaatttacctaagaggcctgccaaaagctcaataggcactttaagcaccactgaatcagatgtgtcatatgaccaaagtggcagggaagcttgccaccctctcacaagggcttgtctttcgccaggccttattcaaaactggaagcctttcagattactcattcagcaaataggtttagactataacaacacacccaaataagatatgttgcctccaaaatccaatgaggcacaccagaaattgggactctttctttatggtaggagagaccagatgtagcattgaacttcaccttgaaagagatatctcaactttccccagaccatgaaaccccaagaaagttcctgaaggagcaaacttctaaatttttctgggatttatttcacaacctcttgcctctatgggtcttaccaaggtgtctaaagtagttgcgatttcctggtccaccagtgtagaggatccatgtggtgtgttgtgaaatgaagaggcaatcaatttcctgtggaatagaataggccagggttggagagttgatataaccctgaggtgaaacaaggagggtaccttgtttcacccttccagatgaaagaaaaatgcttctgatagtctctactaacatgtatatagaggaaaaaatgacttcccatatcagtattcatatattagatgtacatatattgatttactatagcaatgaaaccacatctggaacagcagctgtgattgtactcaccacctgattaagtttacaataatcctttgtcattcttcaagatccatctgtcttctgcacaggccagatagttgagttgaatggaggtgtggtgaaaatcaccagccctgcatcttttaaatcttttatagaggcactaatctctacaagtctctacagaatgcagtgctgctgtggatttactagtttggaatacaaaggcagttctaatgccttctacttgtcctcactcctcagatcagataatcaatgtagttattctgcctttcctgagtgtgcctccttcagttaagcattctagaacttgggaaataaccatggggtaagttcagagctaactggatgcaatatgagatggacctgagccaaaataccattaatcattcagcttcaataaacccctactctggtaaataggcaatagtagcatattgtgtctccaaggactggtatcatttcagagccaatgtccagaaatcccccaaaggtctggttatttacccttcccaaatgcactatgaccttggcaaatggctttaggtcttttcagggaaggaaagaaagagaaattacagtctaaacttttggaatgtaaatataaattagaaaaaatcctgcagtccttttggcaggcagggtacctcatcattttgttcctgccctgatatgggttgccaggagttgagtctagctataggcatacaaacagtgaaagatgttgggggtgagtcttgaggggtctcagcaattttccacagagtaagtccttacagccttttcaatcaagggaggactaaactcctcagagggaaaggctgcttctgctgggaaaggagacagggctttcaaggttctcagcttccaaagaatctgcctacatgttgccatctcaattttcaggggaggaaagaaggagaaattacagtctaaacttttggaatgtaaatataaattagaaaaatcctgcagcccttttggcaggcatggtacctcatcattttgttcctgccctgatacagcctgccagctctgtcccaatcaaagccctaattttaactgtaagaccttcaattgaattgatgttctaatctagctagctgcaggatcagtctttgggcttggttttttgaaatatcagatcttgcagctatgagagataagagtttctttcagagtagtcacaaagacttttcagtcccttgcctgcatcttgaactgaacattcaacactctgagtttatttctttttctccatattctctgtgacactttgaagcaacccacaaactccagtcctcatactccttacttccactacattggtctatggcagcatctacctggtaatctaacaccttgccttctataagcacttgatatcaaggactactgtgtcccatttaccattggcagtatagtcactaatgcttcatcgaatcagagaatcaacaccaaattcccatccttaaaattctatctctggattcacttccaacaccaatagttgtgtcagttaagagtcagtcagggaagcagaaccactgtgaatgatacagaatataggaatagtggattcgttgtggaatcagaccttacaaatgtgagagaagctagagaaggaaaggtctggaagaaggagtcagaagatcagaaaaagggtcattaacctgtctatcttatgcagtagcacagatggaccagacaggctggggcttgggggaaatctaggaagctaaacactttcaaccaccaaagtgggactgtgaaggggagctcatgaagaactgtatggagagtggttacctgtctgtagcaaccacttctgtgggtccacagccaagtagttggtgatgggtctcgagtcactgttgttcagcagagccaagagtcagaaagattcgctggatgcagagtgaaggaaagcaaggactatatgggacctaccaagcatctctccctctgtccatcactgtatgtgaccacagtgacttcctaagagtaatagttaccacttctgtgttctaactcttttcccatttcatctcttagccaatgctaatacagagcgatacatgaaaggggattctgagaaatgcagttgtctgcttaagcaagttgaccagcataatccagcacaacttctaaatctcagaagatagcaaatgtgggcagaaagaaaagtacagatgctccacgggttcactggtgatctttatggctgcaactgacctaggatttgggagatgcttggagagggacagaggggcacacaggaactttcctctcaaatatgaggatatcaatctagatctacgaggagtccttttggagataaaaagaaatttataggagatgatgaacaaaaggcccaatttctatattagactgtctccctgaatgagggtgaataccaagaggagactgagccaaggcctcagccctctgaattctaaaatgtagagaacttcattctgatctattttatacaaatggtgctggtctctcagacagtaccttttccgatgaaagaaagagagaaacgaagtagaagattcgtaacccagctcagtaaagaggcttacctttgctctttgctcaccatcattcccccgctcaaagtctcagctacctgcctctgtgcaatagctacacagtgctcctcaagtatctgcctcctgaacacagaattataactaacaagtatttaaaatttatgtatttggtgcacatctttcagtatgagctttttggcaccaactcttactgaatgccaatataaaagtaaacaatttgaaattattttaagtgattatcaaaaataacagcataaattctatgatgtggacttcagccacagtcccttccagggactcttccaggcagaccaaaagagaaaagctgtctgcaaaagaaactcaaagttcccaggaccaatagcatacttgagtcagatacagctccttaaaagacaagtaattttcagaggccctagggtaaactaaattagttttaacataatactatttaaacatgtagaaacataatatgatttataaactctatatgcttattgctcttatgccaacaatttaaaaatataaattaaacattcacaaagcttcaaaaccactacaacttcaataaataattttaatttaatgtaatgataatacttggctaaaactaaatcaccaggtttttttctttccaccttttatattaggtttaggtggtacaggtgcaggtttgtggaatgggtaaatatatgtcatgggggtttgacaagatacagattatttcgtcacccaagtaataagcatagtacccaataggtaatttttcaatcttcactctcctcctaccttccaccctcaactgggccctggtgtctattgttcccttctttgtgtccatgtgtactcaatgtttaactcccacttataagtaagaacatgcagcctttggttttctgttcctgcattaattcacttaggataagaacttccagctccatccatgttgctgcaaaggatgtgacttttttcttttttatggctgagtagtatttcatggtgtatatgtaccacattttctttatccagttcatcatttaagtcaccagttttgagtttaatagatgaaagatatatacgtggtgctgggttttgcttattaacttgattcttctcattttgtacataattttcatgcttgttttcctttgtttgaaacaaattcatattgaattgttaattaattcacttgatgggccaatcaatttactgtgcaccaatagtacaatactgaaagaaatatttttaacttttaatgaagcattctttactattgctaatcaactgtagtacagtgatttatacaaaagatgagctctacacagtacagccatgtgaatggggaatttagcaccaatcattcattgagttccccatgcttacagcatctaacttgttatgattctattttccaatgactgttttatattcaaattacttgacattattaggccttcacttagtattaaagtaactattagtattagcaaagcagggcatcaaaatattgtgacagtgtttgcttatagtttttcagccccaacgtgagttagttgtgttttatgaggggtatgtactccttataattttgcataatttaaggcttatgtttccgtggggaactggttcacagagcccaaatacctacaactttgtagcacatttctgttttgatgccgctctttattttcttagcattatctacaatatttagcaactgctcttttctaaattagtggtaaaacacatcaagggagttgtttggctttttctgtgggagtgaattatagctaacatctgtgaaaagttatgtatctgaatgcacattttccagcatgagctttagtaccaactcctaatgaatgctaatataaaaagaagtaaaacaatttgaaattatttaagtgattattaaacataatagcataaaataaccaagatctcttatagaaatgctcataaagcaacaggtggaacataccatactaacaatggctggttctttccattaaagctgaagtagctccaccatgtggcaggagtaaaaacaatctacgattcctttagcttgttcaccaactgaaattacgcaaatctcatttaagtttgatgagaaccacaaaattacccattcttctcagaatatatgggctattaatttttatatcacattacttaaatttcacataatttatgctgcccaactacatgttttagactaccattccattgaaaacacatttttaactccataaaattatgaagacccatgaaaattctagagatgcatatattccaagtataataaatatcacaaataacttttaaattcaatttttaaataattcttgttactattataatttccatacaggtctcagaagcatcttaaaagtaatgataactttttgtctctgtaaaaagaatactattcaaaaaaggacaaaaagttcataaatgtggaatactaactttgtaactaatatataaaatacatgagttttttgattcctaaattcttccaacagaaattcaaataatgtaaaatattggtatctttaagccgtaacttattaccttgttaatttcaaaacagcatactagtaacctgatctttaacattagttgttaccaaattatagtttttaaaaaatttcctaggaaagtacgccattttttgggtatcgaacatctcacctcataggaatacggggattgttttccttccactcttttgtattttccaaattttcaatgtaataagcacatattaattttatgatgaaatgaaatttgtaaaagaataaatgttaacattagaagataattaacaagttatctatctcgagtacaatatacaatacaaggaaattaatataccactttaccctggtggcaaggaaaataggtgagatatctttcccatcacaacataaaaatatatgttagtaaatattcatattggaaaggaatgtattctatgacctagcaattactgcgtcccagtcttggcattactcttattgtaaaagaaagcatgaacaagcagcaattttggggccataaaaagttggaaataacataatcatatagtaaaaagtgatatcacaggttataataagtctatgttccatatattaaaaataatgacacgaatctacatataatgaaaagagaagattgccaaaatgcattattgattgagaatgcaagttgcagaataatatatacagtattatgctatttatgttgataaaaatattgtacagtataaaccctaaatattgcacagcaaaaggactgtaagtacattgatgaattccctgttattagtacctgtggaagagggaattatattgtgggatgggagaacagtcagtggagagtttggttttaattgcaatgcttttatttttataataaggatgtattagcatattacttgcataattaaactttgttttttaggttttcttcttcaccatcgtatatttgcatgcatatacctatgcaaataacaaagtccacctttattggggatttgtgactggcatttttctaagcactttgtcatgtgtcatatattgtatcatgtaaacttattattaaccttatgatgctaataatatttttcccatttcacagatgacgaaaccaagcctcagaggaactgagtacattgcccaaattcaccaagcccgtaagggttacaatcaaactttgaatccagatatctgtctcagagtccacaatcttaaccaaaattttttttacaaattcccatgtagaagtgtgtacatccacatacagacgtacacacacacacatccctgctgtccagccttttctccccctgacacttgagtgcacaggtcattggcatcttctctccataactttccaccattgacagaaatgtgtttgctcaagggatgaattgaggtgaaaaccttacaacattagctcttttgtaaaaaatctgagcagattttttattttgtattttgttttcctggttacgcctctccttttaaagttttgaaaggtggcattaatatctatttctttcctgactgctccatttattagtttcattaggattagtgaattctacttggtctttccccaatccattaatattttttcccttcacttaaaaacaaacaaacaaaaaaaaaaaacacttgttttccaaatggctttggggtggtagtaggatttcctgatggctagaggaaactcctcatggcagtatcttggttgagtaattggtcctcgtctgtatgttcaagaaggtgaatgttcttagtaaacccagaggggatcagcccatcagaggtaagcttctgctatgtaaattgagacgagattcaggcttaacctcaaataccaatgcatttgctcttctggtctctcccttctcctccttattatcatgatactttaaaagccaaattactgataagaaatttgcttgctgagaacatagaaaggtaaacggctcgagagagggggttgtacatttttctttaaatctaaaaaaccactatgaagaatcccaacctcccaacaaaaattgcctctctgttaactggattttacctgcatccagttttaacacctctctcctctggacagtgctgacactgtcctcctgggaattatgacttccttagacacataatgctagagtcaagttggaacttagattctttttcttgcggaagtgggaggcattgtgtcttctcccttcatgcattaatttaattagaaaaacattcactgtctctcactatcagcctacagattctctatcttctcagcccggtaagagccttatcacactgagataaatggttctctttgttgtaccaaggtggttcctgaagcatggtaatggggaggagacacctagagatcaaagcaactaatacaatcaactccaatccagccccaaaccaagtctttccaccagctattcctttcatatctaaatgttgtcctcttcctctgcagcaggatagaaaatcaatttctaagtgtaaaggcagtaaacaaaatttcagagatatatagtatatgtaagtttgagtgcataaagttaaaagattcccaaatatctaaaaatgtttgaattaaaaaatcagtatcaaattagtaaaaaaaaaaaaaattaaaaaggtatgtgagctgtataacagtcaaatgttaatatgcttaatatattaaaagtgtatataaaaggataaggacaacactagcctgatggatatataggcaaaattcggatacaaaaattgtgtataaattactaatgaatatttgaaaaaaaacactgaaaattttaaaatgcaatgaagacagctataattcatatcaagttaacaactatttttaaacaatcacaatctaatgctgatgaaattcggcatattaagagcaattacatttttactgctatgattgcaaattgatacagtataacagtagattatttggcattaggtatcaacagcttttaaaatagtcatcctcttgacccaaatattggaaatctatcattaaaagggtcttctgagcagattttatataagcaaaatgttcattaaatatttttcatactttcacgtaatttgaaataacataactatccaacactagagaaacagttaagcaaattgagcaacatctacccagtagaatactatgccaccattaaaaattagattttcaagagttttaaattacatgggggaaaataaagttaacagaaaattgaatgtacaaaacggcctcaacaatgtcagaaaatatacttaagaccaaagactaaaaggaaatatgccaaaatgatgtagttattgtctctgggtagtgagataatagattatttccttcttcctcttctttttataattgtatgtaaaccacaatttcttcttcaatgaaaacatatttttataatgagaaaaaatgatctaataacagtatcttttaaatacaaggttatgtgccctgaaaacattcctagtttcccttaaagtcatttgtctaacataagtgaatttgtctgaatctctctagaatacacattcatatgctctaccccaggagcaaggagttcctaaaatctactccctactatgtaaaataaaactgcctttaattttttcctgaatttgtttcagacttcaagtagagttctttattatttctgttcaacagcacaaactacaaacataatctgtttggcaaaccatttttattcaaaagtataataatgccttgtttttcatccttccagaggacctagtggaagaaaatgcctaacatcagggaacagtaggagcagcctaaattgaccacagaattgtatttggccactgtcctcaaaaaattcaagtggattcagtaatcctgaatacttatgtacaacaagcattcctactataatagatcatgaggattaaaatgaggtgagttcattggtgagcatgacatgtagccatagcaattaatcttaggttccttctcccttaaaaatggctaataaaacagaagaaatgctgtatgaataatttcagaataacatggaataattgtagatatttctataagatttgtaccagatccactagaacaaatctaccagtagctaaacactgtagagtctctaaaaatggacaaggaggagatgtgacaaagatactctttaggggaataaagtcatcctaaaaactgaagatattttctgctctgccaatcaaggaatcactgttctttccccagcaagaaggagagtgaaaagaggaccaaattggaggccccaaatttgcattttaatcataacctttcatagctaattatgagatttgagcattctctggatctcagtttgccacccataaaatgatgggtggactgaaagatttctaagttttccagttctgacattgcatgggtctataaggagctccatcttggttggcccctgaaggcacctggagactttggttttagggaaccaaggagtctcagtgctgaatgaggatatagttccccggtgtagaattttagaaactatgcaagcacttggatctttaaaaaaaaaatagttggtccctgggctgtctcttacaactttaatatttacactatgacaaagtgaaagtgctcattcgtgttcgagccaaagtaataccattctctttattcattccaatgagctaattttacatgagcaagaaagcactggagaggtacagacccatgggatatttgcctagcctaagtgagtctcagatggaaataaatatgaaaagcgttagcatgggacctgtgagaaattgattcttacatctggcctccaaagggtcaagccacaaataagtgacctttgacatgccccttctctagttcagcctggagctgcccacatttcccagtggtgcccagtcaactcattctcctgatgcaggatcatcagagagaatctggagtaatggcagctgcgggtaaggggctgccaaataatagtggaacaaagatctcttccaagtttctatttcctccgaatagctcaaatacttcaacagtccaggtccccctaaagactgcattttcttagctgcattctctctagttgtgatgagtgtctcaaaaaggaacacctctcctcctgagtttatgatagtttatgacctgccacttcatttccagcagtgtgtcccagttcctcttgcaatccacaaaggacactttttctttcagtagcctggtgtgagctcttgcctctcaggattagctgtgatcttactgctggggtgggagcacacttagccacagggcccaaaagaactactgtcactgaaaagagcactttcctgtatttgagggctcttcctctcttctggtacacccggggaaaaacctggcagagtccacccacagtctttgaggattaattctgtaagaacttcttacactgaagggaatcctcctccaggggatgattctgctctgtgcttctgagctctgatggcaatcacatcaacatcgccagggactgtggcagaagaggaacatcacccactggaaaccggggcaagttgctcctctgtagttccaggaaatggccagaggcacagctctgctgttccaatttgcagttttctctaacatcaaaaataaaatgtgatttgcatttgaaattttacagaattcctcattttaggtcaagactggccttacccataggttagtgacttatgtggtaggatttaacacacacacacacatacacacacaaatattatccataaaaagaattatattcccaccaacctgctgtggcattcatcagtgaccctttgaagttcagccattgaaggggcaggttaaaatgcaaatttgtttcttggagaggtagcacatagagctattatcaactgtcaatgctccggtattgctggaatgtcagactaagaagtttgggttaaaaattaacatatcagtaagtgaagactggctttatatattacatatttaatttataaaaatggtgacattaaaaggtggcaccaaaatgtaaatagaatcaagatcactttggataaattaacgcatgacacaagcctttgacatgttattaatggaaatgagtttgggggatctaatttagcctttgagattagtgtcaacaaagaaaggtatctcctctggtgcccatggcagaagcagaacattagtacaattcaccatagatcagtttcactttgtaattcagtgtaagtggtttatatgatagagagggcaggaagatctggttttgactctgtctctactacttacaagatgcgtgaagctgctcaagtcacttaagcaaggtgagcctcaggttcttcatctacaaaagtgggatgtagaaaagaagagtaaatgtaaaattcctgttcagtagttgtctattaaagaatctctccttccttcctctattcacatccatcagggagaggagtaggctgatggtgccagctaaggacctcggcactcctagacctattcctgaaccattaatggctctgaatttgggacaggaatgttactctcatggttaattccttgctcacttgtctgctggtgcttgttcacaatgtcaaagatatggcaacttcatgggaaggcaggtttaactttttggtgtttttgcactagcctgtatatctgtctacctttcatatgagaaccaccttgctgattcagactggaagcttcaagagagaagtttctttccatttaatgcactggggatggtgctcaacagagaaccacactcaaatcggggctaaataatatggcaatatcatggttacaaaagaaacacctccctttctcaccaaatcactgaatcccttattctataaaaatgaaattgaactgcaaacatcaccaccatgacaagaggatttaggcacactgatcaactgattaaattctatttgtcatccagagtgatcctggaggccttcagagcctggaggaaacctctctgtgactctactcacatctttacacacggaaaatccaattaggctgagtatctacagcagcttccagaagtaaactgattgcagaagggcagcctgctgcctgaggactgcaggggacgaggaaggggtgggccacctggaagggacctctgccttctcagcacctagagttggtttccagatgatcacatagtttaacccttttcttttatagacaaggaaattgaggcccagaaaggttaacagtcttgcccaagacctaagattagaaggcagagttggggttgagaattgcttatgtgagactcagacccaaagcagacgaccatattttcaaattcagtgaaaactggaaaactcgtatgggcctacccagcctggaaaatccccatgtattaccaatacatagtaaacgaatcaaagattgaaaagtttacttgaaaaccaatcagaagtcctctcccacatgcaaaaatcccaccctaatagaacactcatcacccgtcagactgtcttaacacttcttcctttttctttctttgcaaacccctttgagcctgtgccagaagtgacggtgtctgccaccctctctgcagtcagtcctgaccagttctctggggtttacacctgtcctctggccactcgtctgctgcacttcctgcatctgcttgtttcaccttggccccagctttacctgaggggtgcttggcctgtgccttgagttccagggcctatgtttacttcaaaaatattaatgtcaattccttcaacttgttccaaagacaacagagcctctcacaagcaggcaagccctgccacttgttacgtagttgaggctgacgagcctgcaggtcccagccaactttatcacctccctcttctgaggggtggaagtccccaacatctcagggtcccctgagagtatggggattcccacatcggcaagtacctgcttcagagaagcccatgagaaactggcccagagcaagcgggtccaccctcccattgtgggaaagtgaagggcagaaggagtctggctggaggtcactcctgccactgatcttcctcactcgggtccagcctgtcagaggataaagcacagtggtgggtgggggtatctggctctcccccaccctccttctcaggggttcagtagtccctgggaacaagattcagctcaggaatttctgggatgctggtcagttctggccctaaggacactgggagtgacagcgggctgctaaggatgtgacagtgactgggctgttcccttcacatgactaccagggcaagccctggccaaatcccagcacctgctgaaagttgaagctgaccactggagtgattagattcatgacatgtggtggaggcctggggagtggagctactgggaaaggacacagctaaggaatctcctccctcccagcattgcttgaccctttcacaaagacagtggtaggtagaggaagaaggagaattggcctactccttccttttcgctgtatatggtcatagaaattgtcagaactttatatctagattcaagttctatctctagcacaattagctctaaaactttgcgaacgttacttaacctcctaggtcctctttgttcataaaacgagaacgtaatacataccttggttggctgtgaaagttatatgagtcagtgttgtggggaagttgaaggcatgcagtagatgcacaaggaaaattaaattccgttccccagttcctggcttgcaagttgggggttaaactcagttaagctcagagaagacatgacatgacgggggatcaagggagatgtgggaagctcacgggctgtggttcccactgatccacattagactccaaatgacaacaccctcacaatcccatgaaattgagcagaatttctcttctttcttgtgatgtttccagaaatgaagagagagggaaggaagacacagactctgatctttggcttcactttggttccaagacctggagctgatagtgtatggagggttgcctgtttgtccaggcactatgaataagaccaaggtaatccagcccaactctacgacacagctaagccaacaagcagctggatcttgtgtctcagcactcacagaaatgtataaatcatctgataccaactgctccccggaagcctctgtctccagaatataaatgtccaactacaggactggcaaagaaaccaagccctgggcaatgcctactatggacccttatttcttgtggtttgctaagaaaaaagtaggcccaagggagaggagggggaaaaccaggagggtctaaagttcttctgactgaaagaaaagaccacatcagagagaaagaaaggaatcagttaagtaataaaaggttgtgagttgatttatcattcaactaaacaaattatcttcctacacaaacattctgaggattaagtgaacaatataatacttttctgagctctttttgatcaaatgctttgctgttaaaggttatattcctagggagttgatactgaagcttcttgttccttgtcagtaaacacaaggagaggccaaccctctgtaaatttaaattacataaaacctttccccaaactgtctggtctcctaacagccccttttcactgaactctgtggttatggaatgtaagtatctttatcacagcagcacagacttttgaaaatttgacataatagaatttcttcctcacaaggcatatcaaacaccattgcaaactagtgggatttttaatcaagactaaagcagaggtcttttatttgtttgtttgtgcttagattatttccacatgaccaataaaatgttctctctgaccatcatccctgctgactagaagtaccaggaaccttgtctcaccctcacctccagaggtaagggtatgaacggactgtgaaaaaacacagcagaacactggggtcagcagagagaaagcgaaagaaccccatgggcagataatctaaaagcagcagagaatcaacgggaaactaacacaagtgcctgaagatggagacagcaatttttagtgattttggcttgtctctgttctatgaagctccaactcagtggcaacctagtgtgaaaatttatgaaatacttttggatttatctctgtaattccaggtctggcacaatataggtttcttgaatgaataaatggatgaacatgtcaatcaatgaatgaacagtaatattaaggaggggaagaaaaccattacaggtcaatgaatgggttcctagaagattcccctgtctcccattgtcttccgactcagggagacaacagctggagcagagtgcctagacttcgggggcttaggaggccacacatcttagagagcatttcaccatcaactgcaattcctttggcagtttgaattataatatttacttccatgatacagtcttcagctgttgtaactgctagtgacccttctctgaatccctacttcgtatgttagacattttttatatggagaattaatacagccttgactgctatgcttcttttttacttccatctctaataataagatcctcaagggtcgagactgtcatactcttgttttttgtgtttacttcactgcatatcctagagctgagtacatatggaagaatgaatcaattaatgaaatttatgaacacatgctgaggtttaaagagaatatcaactgcttggtttgatgacaaaaagcaacatcactctgtgtctagcacgtagcccagaggtgcgggccccatcctctcgtgtgaggagcccacggtgatgcataggcacctgcaccccgtgcctaaaccctgcagctggcacgggccctgtctgctcttcattcaccgttctcacgagttgcaataagttcagccctccatgtcacactgtgttttccatcctggggagtgtttcacagctatcccaagccccacgctgacgaatcacggccgaaaacacactctgatgccagcacagaccacggagcaaatgtcagacaagatcagcctcggaaaagtgagtcctgaattgcgatggaagtgggcttcctctcacaaggactttgtgtggagatgcgcaggtgggctgttggaaaagacccatggaattcccttcctctgggtgccttttctgtcccaacctctggggattcctcaagaatcggggggatttcagcacggagtgtgggactctgtctgccccaagatcagaggattcaccttgccttttggaaagaactgcccagtgtatcaggtttttatgagtcagttttagagttgggaatgcggacagatttgtaagaaagtccacagagcatatctctccacagcggagaaggctctcgagccccagaaggcaatatcacggtggcctaggtggatgtcacggggtgagaatcaaccctcagttgccacgaggaatctgaggagatccaggattacggtttttatgtaactgtcttacctctgtttcacaagggccaaaacttcagccccgttataaaatcaacagatgcagaaaagagacaagtggccactagatggcagcagatggtaagaaacgtgagttgcaggcgggctgggcaagagttaggctggaagcccctccattttgctttacatctttaatgagatatgtgaagaaaattagtcccttacatgccagacgcagatgccacagcatatggagagatgccgcacagcaatatttctctggttattaaacaggaggcacctaaccagtcattcactgcatcatcatgcagagttatcctttaggtctccggatactgttgttgacaaggtaataacagaagaaagcagttgagaagactgatgtcgggacgtgggcctctgggctcgtgggacttcaccatgccaggggatggggcacattgccagaaaatgaggagcagcccactggggccacttttccgtggccagggggacactgtggcttctgctgccgggcttagtcccagcaggcgtctgctgctctctggtccccctggcagccctcgggggctcatttattcagaagccccattaccgcgagacaattctgcggtctgacctttcaccacaaatcccaaatgggaaagggagctctgggaattttaaagagcaaaccacacttgcttctccagcaaaattgaaaagatacagcataactagagtgcattcaggtgcacatagatagggaaacacggtttccatgctgccccaaacaaaaggagggagtccagtcctgccgactgcaggaaacagcctcactcggaagacacactttttcttgggagagtgttcccaggtccagagcaggcagggattgcgcccacttccccacttctcacacttttctccaaccccaccactcagtctgactattcctttatttaattcttccacactcccaaacccaggggcttcataaggccttcagggtagctgaggaacagagaacagattattcagtccaggcaactagtccttgtctcaggcccaacaagaaactgttatcttattaacctgaaagcccagaactctcaggacttctcagagtcactcatgaagccccttaacagtcctgaaatgaagataaataatacagccatttttcgtacagagaaactgaggtataaaactgagatcagctgcagctctcctggtccccattgctttcccacagattcaaccctctgaagcatcctccagtgaaaatgtagtagcaagattcaccctaccaggatttctctccccctcttagaaaattacttcctgcgctagaaatcctcacttgtctgtgtgactttagacaacttgcttaacctctctgtgcctcacttatcatctgtaatttgagggactagaaccagatgatgactaaggcccattccagctcacagtcttgtggctaatttcccagtcctctgccagccctcaaagagagttgtatgggacactttttccagcaacagccaaactcaacaggagcaagcagaatttccttctccaattgagaagcaatggggtggtggttggagtcttgttgatgtcctttgtcctcggagtgaggcaaacagtgaggcttcagatgttattggcactaacagcagggcctggaggtggccacactcttgtggaaggaccatgcagagctgtccctgtgggcagtgtaggtgcatagccaagactgagggatgttttaataactacttctcaataagaagtcctattttattctgcacaggggtgtggacccaatccaggtctcccaggaggaatctactctcacccataataggggattggttcagctcagctgcgctcacaaagggctatacagcatgcagcagtacaggcagctccccgcagctccatgtgaaaatgactcacagcagttatgaacatcaaacctcctttgatgtgttcccagacatgaagaacagccacgggaggaggagacggactctggttgctagctctgtggggtggcgcacagagggcctggacacatctggtaccatcctgaagctccaggagaaattcaggctgggtaattacctaggacttcctaggataacagagcttctttcatctatctctctccctccctctcactgtctttctgtctccagctacaagggaattagattctccaaggaattacaacctgtttctgtaccttcacctttcccgaggagataacaattcacatccctgaataaaagttgttttattgagcacaaaatgaatgcacccccctcgctcagcatctgtgccaattgccttaaagctatagacctggcctccatcagccaagtgaaaggattttcctctgtcatggccatttccagactctcagccttttgagtagccacatggtaccttgtcctcctaataggctctcaatgatgattgaatacaaaggctctaattctctgttgcattggcagctcccaagactgggtcgatcacaatcgtccacagcagaagacagcggtgctgacggtcaaatgagcatcagggcacacagcagaaggggagggtcagccactgtcccttcatgcccatttcaacagaaagcttatttatatgcaagaggtgttccccttccagacagggttcaagagcacattggtccctggaaacttgagcaaagtcttcacggttatagaagggagtggcaaaggacatgtaggagagaatcagttccaccccatgcctgcacatttcattttctgaaatgaaaagctctcatacactcacagagatctgcacatacccacacatggaaatagcataaacagctactctttactgagcagtgaccacgtgtcaggcacaatgcctcgggcttcacatgcatcatctctaatcctcatcgacgttctgggtgtgggagtgaaggcatccctgttttatggatgaggaacctaaggtcagaaaggctaagaaactttcttaagattgaacaactatggtagaagagctacaattctagatggttggattccaaagcatcatctcttaaccactgtactatggggcaatatgcttataagcaagtgcttactctgttggaggcactggggttatgagatagtgcaggaaagacatagttattcacttcgcaaagcttcatttttaccgcacactcatgcacacagtgctacacacacacatgcagagttactataactgtggtgtcttccaagagccctgtcactaaggtatcctcagtgtcgtactctcagtcctcctgcacttgaaccacagtttgaattgtgcatagggtaaagactgaggtcttctacagaaaggcctaagctgcttgaactttacagacaattatgtgagcaattcaaccttttatacattatgctgtagttacccagctcctgaactagtcatcaggtattttatttgttttttaacgtgatcaggaagtttctctgactcatttctctatctttgcagaggaacaaggtaggagagcaacaggggcaggaacagagaggatttcaagcttgatgaaggttcagtaagtcaagtcataggtcaactagaagaaataaagcaggggaagatttggggtggggctgaagctccattgtttccatgacaccataagataagtggtgatctaggtgatctaggtgtgcaaaggtgaaacaaaacgaaagacgcaaacattgtactagtttcaggttttgccaagagcagattggctgccaaggctacttcagccttgactcatatagatccatgatctgggaggcaagacagcgtcctgctgtgctggacatctcagtgacattgacccaactgggggaactccctgaggttaagaaaacctccctccaaggctgagttaatgaactacctagatgtaagacaggagactgaaaacatttaagtcccaggaaaaatgcagacttaccttcttatgacctagatctctttgcaaatctaatgaaaaaggtttgttatgcacaaatgtttccctccaattttatttcaggagatttgtgctctttcctggactgcccctgaacctggaggtaataattctagatcaaagtctccctagaaccttgaaaagggtggactgagaagactggatatacagctctaggcaaccagtcctccactgccaccaccatgctttctaatctccaggggagcctggtcatcttgctggacaattgctgtttctcctgacaaaatccaagttaggaaactgacagggtctttgtttctatttctctctatgcctatctctcaaggtgccctgtcattaatgaatcttaatcctcacttttatttctcaactctggctcccaatttctgttttcccacccctcatctgggggagccacccggaaccccctcattaatccacagacagccatctcaggacttcatgctaagaattcattgtttcccactttcctgcatttgaacactggagggcaatgctggaccagccaaagcactctaggtgctccgctccatctttgtctcaaccttgcctgtcatttcaggaagcagcctctggttggaagccaaaaccaaggaccagtggagcgcccataggctagcagaacagctaggtctattacagcatctcccccacacgggatcataggaataaaaggtagctcacggaaaagcacatctggtttcatgggtgacacaatcccctgggaaagaaactgagcggggtgcttgcctaactgtgtcattaaccagaaacaatctgtgtctctgactaggggatgcagattcctacctgtcttcactcactcagatgtaagcccctggagggtaatgtcttagtaaggtctgcattcctgtagcaagcacagtgtttggcaacaaatacttgctggatgaataaatggatgaatgcgtgtatggatacatatgtataaaatggaactggccattttcagatttgttgttgttttctagctcttatgacacccaaagtttaaatcattaatcagttgctgagcattcttagtcttaaagacaactaaggatggtcaggtggttaattaaatcagtggttgtcattgtacaaatgttatttcaaacaccacttcaagagtttcaggtctcttatttttaggaagtccttcattgtgtcatccatgtgtcctcagacctcaccagcctgtggattacaaaatacagacactatttcattaatattcaatttacaagaacctgcgggctcatcatgtggaatattgagtatccgtgatgtccccaagtgatttgtgggcatttcatgtgccacagtgggtccccacggggcttgacagttccatggagccagagctcttcttcaggccatctttcatcatcttgtgagacttttctccaggctgctctcccctctaccttcaccacaatggatcccatgtcaggtggacatggtctactctcttaatcattcaaagcactgctaaatgtttgaggaagaaagaagagcacattttgagacccaaaacccaacttgagactctttctacctccaggcaggcttacgcatagcaaagaccagctcaaggcgcccggtagaagtctgcaggcatctccatatctccaagtgcagagagcagaggagattttttcttctcagtccaagactagttcttttcctgccctgggatgattgacagtgagaaaaaacatttcctccagggaagcgctctacctgcccctccaccttctcagacggggcccgaccttcatgaccccgacaaagcaaacctggtgctcaactgtcttattagatcttctaacactatgtgtgtgacatcaacagccctaactaaattcacacttgggaaaaatatgcccctcattctaactaaacagacaccatttaattttcctaacagaacacttactattttgatgcacgacacctgttttcagttttatgataacttcataatctccaatacaatgagtgagtgtttatttgaaatgagaataacctcattctcaactagttttctcaacagaagaagagtgctcaaagttcatctagggtctttacctacagaaattcaatgctgtcagcaatcttcaaggagcagctctgccaaaggaaaaagaaagaaagaaaaaaggaaatcctgcttttataagttatccctattattaaaatttctaacaaatctctccctacagttcaaacctaggtccccagagtatatgggcctcatccttctcataaaaatgctgttaaaaaaaaaaggtgtcctttgacacctttcctgagtgcaaacagagattgaaaaaaatcattctaaaataacatttttctgtcactgcccaatgggaggtgagttgatcataggtgaagcatgtcctattagtatgtcttgctcaggatgcctttggtgtgagtaagggatgggtttctagggcaaaatctctgttctatacccgcaaaaaacaatgtacagaaatttccctaagagaggagattggcagtcaatacataagactccataggcaggaagtgtccagggtcagctccctgcattcaaatacagacctgcatcagggctgtgatttccaggtccaaggctcggtgagtggataatacctaaggcctgatgccaggcctgatgtccaggtttaacactgatggcaggccacagaccctcctgtcttgggattccaaaaagcccagaatctttcccagttcctactgacactaacttttgcccgggcaagaagtgtctgagattgcttcccttgagaccatagtcctttcttataattccaaaactaagcagccctgtttatgctgctgtggcagagcatggaatcttggttagtccttccaaactgcacccattgggttatccctggggaaatgatcacattacgctactttgttgaacactgaggactccaataaggactgtgaatcccaactatttctggtgtgggagccagggctttcaggtcattcaccagaaattatccaaccagaaaactttctttcaagttctgttcaaagtccagcagtttgcctacaggattcagatgagacttctaagaatcatctgtgtcttggatagagcaccctggcagcctcttgaaaatcaattccctaagaaacctatcttttagaaatggaccttcacaaagccagtgagagaatgggaggagtatgtggtttccaatgggagacatatatagacttttatgtcatgaatttctgaagtcagaccgtgacaaatgttggtcagagtacaatgcacagttgcccaaaggaggggaaattagcttggttcaggaggactaggaaatcctccccatggaagttttagttaaagtgacttaaaggatgaatgattttgacaaatgagggattggagaaggacatggcgggcagagggagtacagcttgagcaatgtccaggagggatatagaactgtgcttggggaacagtgatcacttggtgagagttgagtctgcctgagttggggcagtggagtggtgggagtggtgggctgtggcttgactgagaaagcttttgtgaatcacattaagggactagattctgttatatgggaaatgggcagaaatcacaggcatataagaggaaatgtgcttcaaagagtgcttggaaagattactatgggtgggaagactggttccaagaccggaaacaatgagatcagatgtaaagttaatatgaaactgaggtagacattgagaaggatcagaaggacttggaaagagaaaacagatttaagaaacacctcaaaaatagataaatgatatgtgggaatgaaagaaaagggagagattgtctcttcccgacatcctggctatgtactggaagattccctagttcccaagccccaaggtcttaccattagaaatcagtccttactcatttgtccattaaggcttaaggtgtcaatccttccaggaatgcttttatgtttctatggtccaaaggcttaatctccagtggcagaatgccaggtaccaatagaggagatttgggggcagtggtcttctcgggaccctcaaaaatcattacatagttgcccactcctcttatttataaagctgttcgtgtgaataagcacccaactactttgtctgtgcccatttgatcactgattgaataagaaataaaagccaaacatctatattctttttcttctctgaataatcttttcccctgtcttcagatttggaacaaggaaacccagatccagggaaaatattctaaatccttgacctccctatccagttggcaccccagcccagtaaaatggcttcaagtacaacattcccccaacagcaaagacagccttcctgggagtcttgggtaggcctgtccagggccaccgtgcagcacacatacatcttcccaaccagctccactgtcacaaacaccatccacactgccatgggcaagcctctggccaccaatgccaccccacctgctctggtgtgggcacacctacagccatgccaccaacactcctcgtgcacatgtctatggtgtatctgtgcagtcacagttgtcaccagctcaattctgtgtaaccctaagtccaggcatcttggggtgaatgtctccttattcctttgtccattgtcctgctctccctttaaaattgttcatgagtgtattttgcagaaagatatgtgatcttgaaagacagagaaggaaagagatgaagtaggagagtggcaggggtgggggtacagattttgagaaaggcaagaaaaaagaaaggatccttgacctccatcagtcccaactcccaaaataagactggccctaaagatagcttattatttatcccaaattaaaattttatggctctgcaatcattgtgtacacagtgaaaagaaaaccatcacacaaaagatgcagttatcctcacagtgggaacaatagcagccaagctgattctgctccaagaatagaataacagtgctaagtcaggaactccaaaactttgtcaacaaatagaataatttcttggtgggaaaatggctatgaaagaaggtgggcaggaaagcaaccttctgactcttgaacttggcatgggttgccagggaaaattccagccttggtccctccatagtgagctcacaaccagctctgctgactggggaaaagtcctgcctgaatatgcacagactccagaaggccctcaccttacccttgcccagaatcatatacagaatctaacaggctgtacctgcttctcttgcctaaagttatgcatcattaccagatttccagctccatgatggcagaaatttcagctgatttttttttccattgtatcctcagcattcagcagaaggtttgtatatacttggcactcaataaacacttgctgaatgaacggttgattgattaatcaattaattgattaatttaaaatgagcaaaatactttctccctgtctggcttctgaagagtgagtctgagtactagaaactgtcagataggcaatagaagccacagtccacttggaaaaatgactgtttctacctttgctcatccttctgggcatcttagattcctgaaattcaggaacaaggacccaagagatcatgacccaccaagtgtctttcaacaaaagactattttcctggctgtttcctttcagagaataagcctcctggggctgataagcgaatggcaccatatgctgaaaacacaggccctgagtggcagagggcaccagagcctcctctgaggagcctgttggattgcagcctttcaacaaatctgagtgtgtcttttgatagcatcagcatcaaccacccccaaggacctctttcttttattgcttcagcaatgaagcagccacatggctgttgtagataaggtggcccaagtgcattgtgcatgcaatgtaggctgctggtgcacagcactgagaatcgcagacacgccgtgtaccagcttctctacactgcgttgcccttcctctgtaagtggcccccaggtaaacgggtgtgattccccaccacttctcatttctcattttctatcatttttttctttgccagatggctcctgcaagactgaaatcacacagccttccaacatggccacaatgattgggacagatgtcaagttccaacgctaatataacattcctgatgggaattatgattctttgtgctggcatctgcaaagagctaaccaaaggtttacctatatctgctatcctttcaaggcaccctggaatcagagcactgctagttgtctgtggacagaaaattgttctccagaacccgaatccttaagcatgtgcagccaagagactgagccatttactgctgtgcactgtgggcaccatgatgcatgctggatatcacactgaacaaacactgtaagcctcaagcagcctcaacacagaaaattcaaaagatccaccaacaacacacagggtgtttagtgtcatcttaaacttgcatcttgaatgcatcatcgattcattcattccaaactaaaagtcccttaaggctttcaaattgatgtactgagtattgtgaaggataccaacatatataacaaacacttctcaaataataaaatgtattcagcaggtacaatctcctcacttttatgttgctaaaccatgagaaattaaaattaaatcctgtataattacttgaatcttccagctgacaaataaaagtagtctttgatacacagaaggacaaatgaattgcacacacatacaaaattaaggccagcaattaacatcttaatgacatacccttaacttaccaacatttctaaaagcctgaaaaaatattaaatatctatgtatacatgatatgtacagtaaatttatagatagatgatagatgaatggatacatagacaggcaagctgtaagaagcatcataaaaggactgagctcaagttcagactttaaagccagacttcttgagttttgaattccagaccttccatttactgactcaatagctatgtgaccttgggcaatttactttttgccttgctttcctcatctataaaataatgattacaataacacctacctcaggggattgttgcaggaattaagtgacctatagcacatgttactgtattcagagcaaagcttggaacatgaaaagcactcagtgagtattaactacttttgcttttgagtgtgataatatcctgaggatgattactaaatttcccctgtgttgggctgggttgagcctttaggaagttgttgataagaaatgtcagtctcttgaacaattaaacattattttctacattagtatcctatctagtaagaagtaaatatcaatggaaattcagagaaatacaattcaaaaggccttcaggacctttttcctggatggcaataaattattgagggcttcctatgtagaaaaaaaaaaaacagaggaaagtaatttctgcttgaccatcataaaataagcaaatataggctttgcgagatattaaaatacaacagtaaccccactcattaaatgaatagaatagtggaataatgtataaatttaaagccaaaagtaaaattaaagttgtttatgcacatatttttgaagtaaaatatttgttctatcaacataaaaggcatagtagatgacctgaaaaagtttccacctccaagaagataacaaatcaagtcaaagtcacagtatgcctgacgttgtgtcatcctcaaaaactgggaagtcaggatcagtccaagactccagaagtgaggaggctctaaaagacacctccacttcagcctctgcttattcaaggccccagccatggaaactcgatggtgtgaactgctgagctgagaactgggggtaagtgaggactgtcttctctgttttcttttctgaagacgcagggtctcctgctaattcggattctgtgttttattcattagtgggaacacaaatcccctgctatcttgctagctttctcatttgcagccaacatatgggtttatcagcacggttagccccccaagaacagcccttcagggacatgggataacacaaaatgggaaattcttcttggaataaagagttggggaaggatcctttgtaaaatttggttttggggtcagatttcaaagtcttaaccctcatgggacaggcagagactcggggatatttggtgagtgactgagtccctattcctcctgagcttgcccttccccagggcacctcagagccagaactgctgaatgttaacatggggcactcaggtttcctacaggacacttacaactctggtaaccctgctgtatactctgccagtaaggaactacttagtaattcctccgagagccaacattcaaagactaatgccacgtcacatgcaatagggaaatgcagctctatctgtcattcacatctctgattctgtcattcattactccatgctaaaagtcccagtgggagaaattgtctttcttctttttcaaaaccagcttctactgaaggtaaagaaaagtttaggggtagaagaacaaagtcattacagaaccatgcattgattggtgagcactgcccaggggcaggttttgtggtaatgatccataagaagcaaagcaaaaattatggtggagtcgatggaatatttgagagtctctgccccaaccatctcataatcgaactgggagccctccaatctccccatgcaagccttggaggacagtcatagaagaaaaagtgagcaagaaggtttaactagctaacaagtgttcatcaagtatccataaatctcagggtacagaagtggcatttttgtattcaatcatgtatatattagtgtttgctatgtgctgtatcccatgccaagatccaagccttcttccactgtgtaactcataccgtagcagggcttacagtctaatagaggacccaaatcagatgcttgtggaaacaagagaaatacttggttgtaataattatgggggtgttccaggaggaaagtacagattgaaattagaatatttcaatttcaggatgagttaggtgatgggagccaagaagacatgctaaaggaattaaatcctgagctgagactagatatgaaaaagtttgtttatttacatcccaagttcccaagtcagtaacagaagcagaattacaactcgagaaaggccccacttgcttctatgctgttttgctcagcagctgcttcctttggtggcacacagctgggaaagtgagtcacagatggactattggcagccaaaatttttttagagacaaatgacactgtgatttttcctgacacccattgaaattcctcactaatttccaaaaatatcttatgttgttttaaaacatccagtgaggcccagacatttcagtagaacaaatcagagaaacaaagttaattccagccatctgagcattctgagcccaaatcagctagactgagaagaagaatcgtttacttaccgaaggcagtcccaggacacccagcagctaaggtcctgactcacagcattctaaccaagagaaaacacaaacacagcatcttctcttttcattcacttctgttcctgttcttcagttgcttgtccaaccagctggagacacagcagagaaaccataaagcaaagaaagcaattaggaacaggagaaacagctgataagcactctgcctaggtagaggtgaatcctgggcacccatcagggaaagactttgccattactaaggctttaggtgaggagtttgagggttacgaataagagataaagcaaggaaagggcttttctttgccaaatttatctttttttcacccataaaactcaaagaggatagggaaagaatgaatgtattctcaaatcaaaggaaaaatagttctaaaacttccaatgagtgagaaaatcagaagttctggcactgactcccatttatattgaagtaatactatgggtaaatattttatatcaaagaccccagagtggcagagaccatcagagaatggcattaaactgggcacgcatagtagccgatatggggttaatttgatttgaccttggcatcttttctcttcttaaagtcctcccatcctttctttatcctgtatagacaaagaagactggggtctaacttttatgtgtcttccatcctaagctgccagagacagtcctttgccaaagggcacagtagattgatactgcccatatgtctctgacacggctccactcagctcattcatttatctacccaagtcctacggcagcctaacatggctcaacagactgctgtttccctcagaggaatgttctgtgccagccttgaaataacaagttctgtgtctctcctggtaactatggctcaggcagggggctatgaccaggtcactaaccccaccatggcaaagaagaaaagacaaggcaaagaagccaatatctgtggagggcttacaaatgagtacctggcacaggaataagcccttcacaagtgttctctcatttcaacctcacagcatccctgcaaggtaactataattaccccatttgcaaataaggaaatcaagactcagagttgtaatttgtcccgctactggtaagtcacaaagcaagattcaaaaccatgggctagtagacctgcaaagtcagtgctccatttacatgtaggtaatatgggcactgataccacctaggcagtgagccacaagctattacaagcaggttctatccaagtgggaggcaccttgctctaggtacctagcaggttctatccaagtgggaggtaccacctgctgcagagtgccccacttctccctgcacctaaaacagtggataaaagacctggatttcccatgttttatcctgagttgctggcaaattctttcctaatctcagtcttcactagataagcaaccaaccctcttggttccttgagagttggggcgtctagaaatcctgcctggactagcaaatatctgtgagttcctaatattgaccagctctgcactggacattaggaatgcaaatataaataaggtactgtttatgttctaagtactcttaaagttcaatgcaggaaacaaacagattatcagagaatagaggtgataagtgtcatggcccaacatggcagggggccaggggaacgcctccctcaggtggagttaaagaagggagaagaaggatggtatggcttttccaggaagaaggagaagccagtgtaaaaactgagcatctggaagtctatgacacatctttgaacctgcaagtattttatgtggctaaagtgttgaacacaacactttcctacatctaaaatgtgcaccacacctgagatgaggctgcccgatcattccaacagtaacatctgataaaagaggccaggagttgaagtgggggcaaggggcttatctttgcagttggcttagaggggccttctttatcagttgaagagggcaggaaaggctgttaggatttttgtggagagatgttgggggtggggggtggggtgctgcacctgtctctcacaggctcctgaagaaaggttgaaaataacagcttttaatactgaataggccctctcattgtggaggcaggctgagataaacagaacttttactatcatgagtgctgtagctcattgcagtctttattgtgaaagtgttcatgtgcataagtcagataaagcaaggatggttttccattaccatcctaatcaaaatttccaaagcttttagagatagctttaattcttactctgtgaagaaggatgaatagagtcattttctgaaatgtttccacaactatttcaggtattgagtgttttatatcttcccttagctgccgaagagtcctggggatccgtaggggtgagcaggaaggggaaatgcacaggcttccttcatgccagttgctgagagagagcttagagacaaatacctgtggtaatgtggaatttctgagttgagcatgggtcaactaaattaaaataaaaatttttattcccaagtctcaagttgaaatgggtaagccaagaaggtctgagaccgcagggagaaaactcctggaggaatccactaaggagacaagtaggcagaggcgcttaaagatacaaacattaaacactcacccagggaatgccttcatcctgttggctctctttgttctgctcaaatatctgtctggcatcctctctccacctaaggttaaaattcgggcattaggacataacgtaaaaattacaactaaaagtcaaccctcctgatatcttctattcaacatttcttccagtgcactattatcttcatcacatattttttatagggtacttactgttcgtggtattggaatgggtcatgggaatagcaaagttctaaggcaagttctattcaaagttctattctcaccaatgtgttttccatttatttttaaaagacagggcattagaaagtacaattaaagattacaaagaatacaaaaatataacggcacatatgataatgagggttagtgatttcatgtgcagtgctctaggagtttatgaaaggaccaattgctataagaaaatttcttaggttcgagactgcagtgagctatcgtcacatcactgcactctagcctgggtgaaagagtgagaccctgactcaaaaaaaagaagagaaatgttttttaaaaccttttttgcttttgtaaaaaaaaatttatttgtatatacttagtgcaagcgcaaatttcttacttgcatatgttgcgtagaggtgaagcttgggcttttagtgtacccatcacccaaatagtaaccattgtacccaataggtaatttttcaaccctcactcccctcccacctcccgacctattggagttttcagtgtctattattctactctgcatgtccatgtgtacacatcgtttagcccccacttataagtgagaacacacagtatttaactttctatttctaggaaattttacttaggataatgaccttcagttccatccatgttgctgcaaaatatattatttcattctttttcataactgtttagtatatataccacattaagaaaattgtcttagaatagctgaagcttaaaagaggcaggagttggataagcaggaaggaaaaggaagggtatttcagggtgggtatactagttatctattgtcacatacaaatcacttcagaacttagaggctcagaacaacatttattatctcagtttccgtgggtcaaaaaatccaagtgtggcttagctgcatcctctggctcaaggtctctcatcaggctgccatcaaagtgttacctagggctgtagtcagctaaaggctcaaccggaataagatacacttcgagttcactcatgtggatgttgacaggctgatatggtttgggtgtgtgttccatccagatctcatgtttaaatgtaattcccagtgttggaggtgggacctagttgaaggcactggttcatgggagaagatcccttatgaatggtttagctccatccccttggtgatgaatgagttctcgctctattagttcatgagcgagctgatcatttaaaatgagcctggtacctcctcctctctctctcttgctccctctctcaccatgtgacatgtgcccaggctctcctgccctgactacagagaaatggacattagatgtggtcaaggcatctctagagcaatggttctcaactctatccacatatttgaatcacctggggatatcctttgaaaatactagtgtctgggatacatctccagagattttgattgatttggtgtgggcttgaagctctggcttaccagatgactcaacctccttcccctcctcttgctcttccctccccctggggttgaaagcaactggcttaagaccttgctattccaagtgtagtctagacaaacacaatcagcatcacctggaaggttttgagaatgcagaatctcgtgcaccatcccagatccactgaatcagaatctgcattttaaacaagactccccaggtaaattatatgcatattaatgtttgagaagcactggtctaggcattcgtcattattgaaaacgttcatggaggtaaaaaaaaaaataaatcactctttcccaaatgtcacccaagaatccatacttgtaaaaaatctcctgaagggatactgatgtgccgccagggctcactgataggcagtcagtcatccccagttcagtttacagattatttgtgttactaccaatataataaatattcttattggggtgatagtgagtccttgtatgcttcttagaggaaggtattacataaattctaggttttatcatttctcattcatccacaagcaaataaggaagtggattaatatttactgagtcaatatactttttaccacaccacgatggattatccatggaaacccagaatcttgtgccacataccttcaattcaagatcaagccaaaaaaaaagatccacaaattattggtgtctgattaagtctgattgggaagaagaggaacaagagacacaagaatgtgtgcgtccagtggtccaatcctgcaggatgaatgaggacatgaagttctggcccgtgatggattggggtaatgtagaaccagaggttggcctggggttagcatgaaaaatagcctagagacaaggaggaggaaatcctgggagaaaatacctggactgcccaacaatctgagggtctgcgcacaatgaaaaaagaaaccagacaaaaattaaagtaaaaaacctggagaaatttaaataattcctgtgcttactagcaggtaattaaggaagcattttatgtaacatctgaagcctcagatttagggggagacagggccactgaaggccctagcatagtaagggcatggaccaagtttctctgcagaaatcccgaagccaaatgagcgatatgaacacccactattatttttgtattattcattttctttttttctttctttcttttttttttttgaaacggagtctcattctgtcacccaggctggagtgcagtggcgtgttctcagcctaccataccctcctccttccaggttcaagcaattcttctgactcagcctcccgaatagctggaattacaggcacccactaccacgcctggctaatttttgtatttttagtagagacggggtttcgccatgttggccagtctggtctcgaactcctgacctcaggcgaatcgcctgcctcagcctcccaaagtgctgggataacaggcgtgagccaccgtgaccagcctgtattgttaattttcttccccctccactggtaaggacaattgagagttgactaaattcttattattgttgcctccactgttctgctttctgtgattcttatccatcatgagaagggctgacttggaagagttcagagcagtgaagagaaatcccagagagtgtctgccaacactcaaaaagactttgaatttgacgtcagaataggaataggcttgccactctcaccagcctcccaagaagagtcattgggcaggctggatggctagaaaaagaagatacctgtctgatgcccaaaggcagctagaaggcatcctggcttcaggaacagtgccatcacctggctgccctcacaaagaggtcatccaacattgtgaaaccatgactatgagtgaaaggcaagagaaaataagggaatctgaaaccatgtgaatatgccacttcctctgcatcacgggacaccagagacgggcaacgaagagaatgttacttctatcatataacacattctcgattcggaaggtgccacagccttgagaaagtcctcattacaccatcttgaaagctctcagggatgatataggtagggtccaaataagaaaatggactcaaggaaatccaaattgtgaccttcactttgaacaattaaaattttaaacagaaaattagaatcgttgaatttgaaatccagaaaggatcttaaaaacaaagtaggaatcccctcattcagtttaaatgttcactaaatattgaatgagtaagtgatcacccagcctcaattcaaatattttcaatgacaattcttgtttcaaaaaatctgtcctataccaaatcaaaatttgcctcccataacttcatatctttatatttgttatgccttccagagcaacgcagactaagttcaccttcgcatattcaaatatttaaagatagctatcctgtataaccattcctcatgactgtctaataaattttaaactccttgagagaagcatccaagttcaatatattttcctgtaccaatgcaattcttaatagagtgactcatctgtagcgggtagtcagcaaatgtgagttgaatacatgaattaatatctatgtgtccacctgaccaacagttctactcgggtgtctcaaaggcacttcagctcaactccaagacttaaatcaagatcttccttgcaaatatggccctagcctaagattccctatctgaaggaataacaccatcatttcaaacccatccactgctctccatccactgccaccagccaggtcaaaactaccattttcttctttggattgtttctatagccttttgagtaagttagccggcctctggtactattcagtatctcctccccacagcagccagagtgatctctccaaaatacaaatatgatcatgtcatgcccctgattaaaaatccttgagtaacttcccattgcagataggcaaatgaccaaaatccctaaaagtcctctaagaccttgcacagtctgactcctcacctcttctgccatacctctcactcttctctccctcattttccaaacatgccttcttccatctattaaatacttgaatgtaccgggtgccttcccaccccagggtctttgcaacacttctcccactcctcatcccctgtttaactcctattgaaaggagttaaacaaaaaagatcaaagcctacacatccgcttttcagaggcatcttgagatctcctaacaatttcaggttgtttattctttaatgctttcatatatcagtttgtaatattttattaatttgattatgcctattttctcatgagtctgtaagctctggagatcaaggactatatctgcatttgcttattcaacctgacaaatcgcataaacatagctgtgtgaataaatgaatgaatttcccacattctgggacttcccagaatttgatcatcatcacagactctgggctgcagtggggcctcaagccttgccatattctcactttttaggggtctcggagactccagtgtcatcctgagctggagtccaaggcttcttagaaaccactgatttctactcattctgtctggcatactcaagagcccattcttgggcacacaggacaactgaacaggattggagggtccttcataggtctgagccagctcccacatagggaccctgaacaggtaagtaaaacctgcccagagagtctagctagacatgaagaaatcagaggggcccaaaatgattattattttctcagtgactactggctgggcttatgatgatccctcttggtgtttttcattttgcatggctattttcagtagctgtatcattaaaatacacaagtctataattatggggatgcatatcctcatccctcaaatatgtactgagcacgcacaatattcctggtcctgtgccacacgctcggttacaaaggcagccaaagctcaattcctgtcctcaaggtgctcttcctagtggaagaaacagacatgaaaatagaaacttactaacagagaaaggagcaaacaaaacacagagaaggaagtgatggcctagagatggggagggtgtctcagaggaggtgacacgggctcataacagaaaaagcacttgtttccccgaggtaaggtgtgcttgcaggttccttaagatgacccaggagggaagatgagcatcctcaacagttacacacaaacacactcaccttcatctctgatgcttgcagtgaaaataaataactgaaaataggcccaacgtgctgtctcatgcctgtaatcccaacactttttttctttgtttgtttgtttgtttgtttgtttgtttgtttttaatcccaacactttgagatgccaatatgggaggattgcttgggcccaggagttcaagaccagcctgggcgacaaagcaagaccccatctctattaaaataaaaagaaaacataaaatattgaaaaacagccaaaaatatgctgaaaaccaccatggcacatgtatacctatgtaacaaacctgcacactctgcacttgtatcctggaacttaaagtaaaataaaaaatttttaaattaaaaaaatgaaactaaataaactgaaattttatggaaaaatacaaaaccccagactagacacaatcagcttctttttgtgggaaaatgaatttatatcaaagctttcataggggttctataaccacagaatgtagttagttccctgccaagtaaaacttagatacttccaaaatgctgctattgtacacaccgcaaaacagagcagccaaaatggtagtggtatgggttgggaagataaagaattaagaaaagtaaagaggaaggggagaggaaaaggagaatattatttccttgaatgatgatcactccttttattaataactttctgttcttattaaagagatgtcccaaacctctgggctttcccagaatttggtaccactggtgcactgacctatcctcatcctgccaatgtgaggaaacccagagagactagtcaaatgccctgcagagcagcaaccacgccagtggggctggctgtgaactttcactttggtgtgttctttgatttcatttggtgtgaaatattgagatttctcctcagatatcccagcgccttgtagctgcactggatctataaatctttatctgggctagattgaaccattttcatttatggagttgtttttaatcagagcaagagtaaaacttttgccctgtacaaaagagtcagctgtaaactgagccattctgcttcagctttcagcttctcctctgaagttgtgtctcttctgagagctctggaataaaacagctgccatagtcatctcacccttccatattttcctctttgtattagtcagctctgctatggtaactaacagtgccaggacctcagtggcttacagcaatgaacatttactttttgttcccacttttactaccaattggctgctgagctctgctccctctgtcttcccattccagagcccaagatgaaagataagccactatttgggacacactttttttttctgacaggatctcactctgttgccgagaggctgaagtgcaatggtgcgatctcagctcactgcagcctcaacctcctgggctcaagcgattctcccacctcagcctcccaagtagctgggactacaggtgtgcatgccaccatacctagctaattttttattttattttattttattttgtagagatggggtttttccatgttgcccaggccagtctcgaactactgggctcaagcagtccacctgccttaaccacccaaagtgctgagattataggcatgagccaccatgcccctccacactgtttttatgacagaagaaaaagaacaagagaaatgctagcagaaactccagatacttcttaaaacttctgctcagacacagcagacattatgtccactcacattcatcagccaaagcccttccatggtcaagcacaagatcaactagtcagggactcacacctttcctgcagaaggcactgcaagacacatagcaatgggtaggaagcaataaccctttttcatggaaagaaggatcaaatacttcagaataataattataacctaccataccctttaactccacccatgtaatttgtctccatcctggggagtttctcctgctgtcaacttaaaaggaatttaaaatgattttttttcttcttggaattcttctggggcaacatttgcccaattattcttcagaatgtcaccatccctcaagatgttaacagtggttgcacaatttaaaagaattccaccatcagataattttggcaaatgctacatattaatagcctcctcttaatatttacaattcttattaccatattaaatgctctgagaacccctgctgtaaagatacctatttaacgtgggattggaatcacagaattctttttgtaatggcacagccattaagactcacgaaattctataggcaaataccgtcccaaaggattacgcaggattcagtcagatagattcctgctgtttcctcatttctgtgcatccagactgaaggatacctaatgacgttgagaggagctatgcataaggccaatgggtctgtacaggcctcaaaaagaaggcttgcattttttgctaagaccaaactcaatgtcagaaacctgaaaatgttattcagatactactctttgtctactgaattaagtataaacacttcagactgtcttttgctccttcctttctttctgcaacaaacgtatcttgagtcctactaggtgccaagtactatgccaggcattgagtacacggtatgagcaaaacagacatgcaccctgccctgtggacttgccagtttaaaataagagagacagacagaagacagggatatgagtaaatagccagtgatcatacaacctcccagtggttagctacaccgttggccacccattcctccttgaaatgctttccacacttagcttctgagatgccactcttggctgattttcctcttcatcactggcttctccttctcagtcccccttgctggctcctcctccactacacagcttctaaatactaaagcagccagggtctatcttctctcctctatctctccctagatgatctcattcaccctcatagcattaatttcacatatgtgcccatgactcccaaatttatatctccagtgcaaaactctcctctgaggatataatcttcccccaattgaaccgccttagcacttcccactcttgagttatttcatgtgttttctcttttgccatgattgttttcatacttccttcatcctcttcctgacttataaacccctcgaggcggggatccttggtctgtttcatcttcagtttccgtagtgcattgcagagtaactgtttaatatatgattattgaatttaatgtttgaactgaatttctgctttagggatcactgagacacagatgtaatgaaagggaatattttatttaaagaaataatgcctcatccttctgtatttccaaatgaacaacctcaaatgagagaacacagctacagacattagcatgaggtgaatacttaagtttaaaaatgctaaatcaagccagtatcatcccttgtggtcacagcagctgctgctgcaaaggttttataaattgcctacattcccgcaccccatctggcgatgctggtgtgttacagccatggatgacttactcttcacaatagccttcacttggatctattccctactttaaaataaaaagacaaaaagaaggtgccaaagggcttgcctaaagtgctcccacccaacaagagtacaattcaaccacataatgctgcctcctcagcatttagaagattagattcagggccaaaggggaggtcagaagaggaaggccccctggattgcagcatttggtatgctgtccagctgagtccccagccatgttgtgagtcaatgcgaacacagcaggtttcaataaaggcaacagttatctaagcaggctgcagccgtgactctcagctcagcctctgggtcaccaatctgggacgtgagctggcacctcgttaaaaaaggtattctgacagagagatggctgtcagtggactcttccaaaaattctctttccctgggttcttctagtccatctccttggcatgtgccattccctatgcatcttttgttagactacatctctggtttctcaccacagcctggacactgctgatgggctagattgctaccatatgctttgtcatgcaccgtgatcccactcacaatgttattccagtgggatagatgctgagatggttcaccatgcaagaggaatcgtgctgcacgtagtattttctttgccctcctttggtaacttcgcaagttcccacagtcactactcagttatgcacgtgtgctaactcaggctcagactactttgcgattagagccctgccaattggatagcttgtatttctattcaataatcttttcattcactcatactaaacattcattccatagctcaatgttaagagccctttaacttgtcatatacatgatgactataacagcactcgcattctaagctaggctttaacacagcgctacagtggtgattatagaacagccactctgaactgcggcttctctagctgtggtgaatgttataaagaaagtgtatttactctagtccttgcccttttaccagtccccacacactaccaaactcaatataaaccccacataaccagcaagaatatctgaggtgtgcaggttatggcaatgggacagcagcagacgcacagtgggtgaggttcctgggacatgaccaggacactggtttatagtggcccaagctgctgtaagtctaagatcccactcaaatactgtactcactttcccacttgatggtttaggaactcttttctagcccccaaagctacattctgagccactttttttttaaacctacacagctgccttcccaaaagtatcctgcagtaattccatgttcctcctccattgtttcctcgttagctctgactccatgttctggcaatctttcagcctcattcctttttcctcccagtctgtaataaaactaagcaaaaggtagtaggtatattagctcaagaattgggatgtacctgtggaactgttgcgtgatgcaagtttttgtcaatgactatgggagcccctggcacggagggccgggcccaccacccctctcccaagggaaagaggacaagtccccatccatctgtcttctcccctcctctggcatcatagacccaccccagtagatagggtcatctcactgtctcccattggaggtggagtgggggagggtctcactcccagaaatgctcctacagctttctcctctcccttggattgaaggatgaaaggtagttatttgcttccccataggggatgaagcagggagtttccctagggttctgggagggcccacccttgtcaccaccctgtggtgccccaggggtaatcggccaactgaaggaatgtaagatctatataataaaatcttaattccacagaagtatgattccagccacaaaatttaagctctctgtagacactaaacactctacatttccataagtcccaccaccaaaggaggagaaaagagcatttatattctctctaacactgcgctatcccctcagcctactcccaaccaagaatcttgagcaaaattctttgctccacttcagaggaggaaagtgggaaatgttttttcctgtgtgcagagactactacaaagagggaggggctcctgttcgggcccatttaaactaattttccatctgctcccaatccaggtttttccagttttacctctttattgggatattgttgaatggaagcacataattaccattattttattttttataaatgggcttctacaaacaaaaacacaggattagtctattattagcatgaaaacctgtgccgtggcttctctgagttctacctggggaccagcacacccccactgtcttccagcgagcagaacaaatcaaagaggatttccagagacagcaataactttacattccacccactgctctccctggggcagcaaatcttcactgtgaaatctgcaattccaggagagcagaaagcaatctatctccctccaaaaacaagttgccatttcagggaactggacacattttcactcctaatggtaggtctccttggattactatggtctgccatgagcctgggaattgtaagacaaaaacagaggaaggaaggaaggaaggaaggaaggaaggaagggagggagggagggagggagggagggagggagggagggagggagggagggagggaaaaagaatgcaaagttgaaatatagcaagaacccattactctatgagtccagtgcgctacaggctgggttccatctcacacacacacacagtgatgtcccaatgtaaggaatcccagctagtgggctccccaactgaattctacctctcagaagggagctggataggacaaaatttctatctgaaaggtcagagcaggattaggaggagaaaccaagaacacagacttagcccatttcaactagcacagaaggacccagaatgccaggtatgatagcacctaacaaatatttactaagcacccactaagtgcccagcactgttgaaagagatcaagggaacagggagatggttggtgctgacgtaagtttgtaagaagtgagcaatcaccaggcagcaaaggtgttgggggtccgcgctggtcatagagaaaggacaaggagcagaagactggccgatcccaatgccacagcaggccctatggtcacaggtgacacctcttccttgtcccctcagtacaacagtgtataagcctttactgtcctacaattcttctttttgttacacagtggctttcaaccctggctgcacatcagaattatctaaggaagttattaaaatcctgttgcccaaaacccaccccagactaatgaaatcagactccgtgggggtggcacctaggcttcagtagttcttaaaactcccccggtggtcccagtgtggggccaagattgaaaaccattgcatggaggtaattgtcctaattacctctccagcttttctctgcctctacattcctcttatctaagctgttatattgcctttttatttttagtttgttctactttgtcctttcagtagataattctataatactccattaaaccttttttcatgctttaactttgttttttctcatttaattttcatcgcccactctacttactccctcttcccattatgtttgttttgttttgtgttttctttaattcagcatcaacatttgcagggcacttgatatggacagagtacggcagcaggcatttaactgctgctaaaaattatatttaacgcagtaatattttgtgttagatcctgtgccgtggctacaggctcttgtcttatggaagattggcactttggcttcttccttggaagtagctgcattgctgtataaatttaagatccaaaataagtatattacaataaaaaataaaagaagcatccacaaatatgagggaaagaagcattaacagcagtctgaagctaaatatcaacatcacccctgccaagctcttggcctcattgtaggtggaagacgctgccatgtgcaacaaaaagagaaagggcccaggctgcatgcacaactaacgaggctgttccctgaggaaagggcatttgctgatttagactcatttcctcaaggtcctcaagcaagcccaagagtacataggccagtcgctgagacactgaaagttgagatgtggaagaaagggccaacagactgtcccagaagcagaatgcttcagtcctccagggaagctttgggggagatctgccctcgtgtcctcctacagctcagctgagagcagccctggagcctcagaaccacaggccctgtagttccctgggtctggcaaacccctgggagaacaaatcactgtcctccccacagagccagcccagcactgagaacaccatacaagccagaggatgcttgccaaatagatgcatgaacgaacgaatgaatgaatgaatgactcctctgatgaagttgtcccagggagagtttgtgggaatactgaaaaggagggtggtccccaagctggtaccccagtccttgatactctgatgtggctttttaatttctctgtcttccttttaccttgatgtatttattctctatcaatctatttgtttatttatttatttactttaggaatcaagccagacaccttgttggagcaacaagagctagagatatttgttccttttagaagaagcaaaattttccagtgccaactgacagggaagaagatgaataattacactatgtcctggtaaagaggacccgagacggcttcctgattttcgtacatcaacaaggagacgtctatgaccctggtctccagcacacctttcttggtagagttgagaattcaaccagccagttcttcctggagattctcagagccacattgagagagcagaggacttacaagtgctgccctatccatggtgactccccttggcctctaggtaagtcacacactgaagcctgcccctcccaccttccaccctggtcagctaatctaggttagtgcaggtctaacctagattacaaggcgtgctcgtgtgcataatttcatgaccaccaacaaccacatggggcaacgttatccccattttattgtccaggaaaccgaggcctggtgtggtaagtgacttgcaagtaagaggaggagtgagatataaacccagattcctgaatctaaattcagtggtctgtactgcagcatagctgccgcctcttgagaactagagtgggcagtgtggaagtgggaattcccaagttcccaggcctcttccagctcagtcttctatgtaaaatttttcttttccaggcttgtctgagcagaggtagagtgaccctgccgcctgttcctcaacagtctgtgcaaattcaaagaaatagagtgtgaattcaaggaactcatttgaagaacaggaaaagcaactctctccttgaggttatcggggaaatgaaggttgaaacatggatcagaagacttgctgaggtcccttccaccctcagctcttccattctgttcccaaatgaggcccaaaacacagctttctccatcactctttaatctgttggttgatttgtctggtgcacccaaccagcactgtggccctgaaaataaaatgttaattacatcaatcttacagccatccatcgctagccatctgatgctgatagaaaggcaggaagcactcgtggcagtttgcatatcagggtcagcagttcctttcttaaccctcctctgtctggcaaggctaagggagcagacgttcctgtaatgacctggcctgtctttagagctgcagccctaagagctggttttcttcctgtggctatggtcttggcactgagctccttcctgctcttcttttgctcttgtgtgtagcggaccacaacatgctttcagatcagacatcctgtgggcagaagaaattatttcacttcaataagaatttttgaagaccagtatgggttcaacgggtgcttttgggagattacaccagagataagaacagactaaatcacacgcgtgaggcagcatttacaaatcatacaacacaatatgcaatagcagcttctgagtttctgcagaggaaaggctaaggacagcaacctggttggaagatgcctcaggaacttgccttgaggctgtattttcatagcacataagattgggaaagacatcaaagaatgggaaaccttccattctggagagatggagattatgggggagaatggataaagcccccaaaaacactcttgcctctcctactaactgttcaagtctcaggtatcattatttgtatgacaaagagaaaattaacatcgttaagcaatgagccaagtgtttacaagtataatttcatttatttctcacagaaatcctatgagttatcttctcccattttacggagtataaaaaaattagttttttctagaaatcacatgaagggacagacatccccttggcaggaccaaggaagctgtggcctaattgctggccttgacacgaaggaatgactgagcacaaagaacacagcctacacagggccggaggagggttgggtctgagggcagagccctggtggatgtttctgccttccacctgggcaccctgagacaggctgtgtttttgttgaagttccatcttgtcctgccacaggcccaggccaagctgactgctcctgacctggtgaagcactagccacactctgccccaagctcccgccgcatcatcacctgtcctctcctgtactgtcttctacctctggctttgatttattgttcataccagctttctctcttagtcaggcctagaggaaggttgtttttggccattagcaataaattcttaaaattccctctaaccggtggaagatataaatcacagtcataaacataatacacattcttgggacttttcaaaatgacttcctgaataatttgagatagttcaacaataattttctagaaagacaggcttatttgagccctgctaactactcttttgatattaatacagctttaaaccctctatacttctttctgcctcaaggcttttttaatacatgtcctcatttgttacatagaatgttatttccccacccatgccccatacctgtttcaggcagggtccaagcaggagacagggcactctcggagtgattagagagagtttaatgaaagggacttttacaaagctgtggacaggtgttatggattgaaatgtgtcccccaagggacacattaactctcagtaccttagaatgtgatcttatttggaaatagggtcactgcagatgtagttaccttaaatgagttcatactggagtatggtgggcccctaatgcaatatgactggcattctatatgacagccaagtgaagacaaagacacgcagggagagaaaaccatgagacagtgcaggcggagactggagtgatacaggtgcgagccaagccaaagaccatcagagtttccagcaaaccaccaaaatctaggaagaggtgaggaaggattcccctacaggtttcagagggtgcatggccctgctgacaccttgatttcaaactttcagcttccagaactgtgaaacaatacgtttatattgttttaactacccagtttgtggtactttgttaaggcagctacaggaaattaatacagaagggttatgggaaaccaaaaagaaggtggtgaaacacccagggctggcaacaaagaaccgctgccatgccaggcctgaagcgtgtaggggaggagcctttactgaaacctgcagctgtggaagaggagttatagcttccagtgaaggaaggcactctcctccttccctccagtctcctgaaggtgtctccattggccaaaccaaatgggatggagagccggtggatgctgccaattaaggtcaggctcagagtaagaagtagagtggatgtgcagaggcaaacagactcagtctcaactgcaatgccacttcctcttcagggaagccttccctgacctcctgaccaaacctggcctctgtaacatgctcccatagtccttctgcttctgcagaatatttatagctgcaatggagggataaattatgcaaattattaagtgatgactggctctcatgctagaacataagctccatgaaagaaaacactgtgtctgccattcatcaatggcagaccctgaatcctcagggcctggcatatagtaagaatgactaggttttataggatgtgccaagaactaagcagcctgatagaaaaaggtcaagtatttaagtccaaacagattgaccttggcaactttcaaagagctatagacagcagacagcattatgttctgctgggggacagggttgctgatgatataatgtgtaacatcaaagaatgtgaccaccttgaatacttgctaatagtcctccaagagcagtaggcaggatgggcagttgtgcaaagtgaggcgaggcagaggtgggtggggagagcaactactatggggtcaagaaacttcatctgctcctatctgaatttttttcagggcagtctgttcccagtcacactggggaacttaagaaagcttagatgagtctttcctccactaacctgggaatgtaagtcctgcatccaccctccaatatggaagccacctttgctcttgcctttttgcttaccaggtgactctcttcccagcttctgctgcactctctagttctcattattaatttacctgtttgatttcaaaatttcaaagattgacctttaaactcaaaagtggaggtcccaaaaatcctaacctcccctcttttgaagtccatgtaaatttagcccgtcataagttgagatgtagtggtggtttctaagttttttacaatgtttggctttgtgtaatttaacacaggtaacctaagaacccttcagaaaagaagctagatgagctcaataaagatcaggaaactctggctcacatttggaagaccatgtttcattggattgctctttaacacatgggtaaatcacccttatccaactttgcctagagggagtttgcagtgaacacaacaatcattacaacatcttcagtctttgtgcacatgctgttgatctcctcatttggtggttcttttgattacagctgtaaatgccaataattcttcttggtatgaactatgaacatcaccacatagtgtctaacatgtacatctaacctgaaactggaacaacaatatcaaatttaacgtctagggaaggaagcagaaaccctgtcaccaattaaataagctgccttaatctcctctcagttggcctaacttacctgaaccgtactattggtcttgaaggtggcactgtcatcccattagcaggcagcaggccctgcgagcctcctgtgatcagctagatttctctggggaatgaaacagctgctgatagggactgacttcctcagtcacaagtgtttcacaagtgtgttggttcagaggagggaccaggcagaaggtggttgagaggcagagctgcccctgagtgagccatgcagaggatctcctccctcatccatctctctctcttctgggcaggtaaggcagaccccagaacttgggccaagcaagactcagcagcaaagaaacatcaaggctcacaggaccttgtactcatggactgtgctccttactcaatgacctcagcccccagccctcactgagcccctctcttgtgtcttttctctcaggagtcatgtcagccattgagttggtgcctgaacaccaaacagtgcctgtgtcaataggggtccctgccaccctcaggtgctccatgaaaggagaagcgatcggtaactactatatcaactggtacaggaagacccaaggtaacacaatgactttcatataccgagaaaaggacatctatggccctggtttcaaagacaatttccaaggtgacattgatattgcaaagaacctggctgtacttaagatacttgcaccatcagagagagatgaagggtcttactactgtgcctgtgacacccaccctgctgcagctctacttctgagcagctcaaaaaccactgaccaggcgcggtggctcacacctgtaatcccagcactttgggaggccgaggtgggtggatcacgaggtcaggagatcgagaccatcctggctaatacggtgaaaccccgtccctactaaaaatacaaaaaaaaaaaattagctggtcgtggtggcgggcacctgcagtccgagctactcaggaggctgaggcaggagaatagcgtgaacatgggaggcggagcttgcagtgagccgaggtcatgccactgcactccagcctgggagacagagcaagagtccatctcaaaaaaaaaaaaaaaagaacattgccatccatgtagagcagcaattccaacaagatcgtgattttctcttgaataaataatttaggaaatagggaccagagaaagctagtgtttctacctttctttcaggctcagccactcagcttgcccgtgccctcccatggtgctcagataggcagcccccagtgggacagaagagaggagagatggagccaaaggaatgaactgtagcatctactgtgacagttttcttggaggctcataaaaggtatgaccacagagccacagtgcttagagtatagcatagattaaggaggcaccttacaatttacaactatgggtgacatccagtttttccccagccacatgcctctgaatttacatgttctagaggaaaaggactggcagtggggggaggctcctctccctccttcagatcaaatatgtacactacctgtcattttgcccaacatggaaggaaaggctacatctctagcatctctagcatgctctgttgttttgatgattactgactggatattttgttttgctttgttttgttttcttcatgagacggggtcttgctgtgtcccccaggctagagtgcagtggcgtgatcatagctcactgcagcctcacactcctgggcccaagctggatatggtgttttgctctccctttcttctctatctctttacttccacatgtgctagaaacaaaacgttgaaaaattgcttccactggcacttccttatccttctttggacagctcaatttaacactgcacttttatcttgaacaatgtgtttttccagatttagatgattgacggggctctctactccaaggctgaacctgtggcagaaatcagccttccttctgtcctcatctagaaaatctaccacttaccttgttaaataacctcataagaacttgtggtgatagacatggtcagtgacttgattgcggtgatagtttcacagatgtacaggcatatcaaactcatcagattagacactctaaatgtgtacagtttatttcacatcaagtatacctcaatacacttgtaaaaatatttgtttaaacccaaaatggattttttaggcttctttggactacttcaggcaacgtctacacaaaatgttcttcaacaaacccctctagtcaaatatcctctagtcaaatatcttccacagaagtacaaagaggctgacagggcttgccacaccttatttggtttcagtcagggcttttcactgttttgccaagtgtcttcccaatcctctctcctctcatgattctgcctgacctttcatatatataatacatgttatatatatatgttataatgtgtcgttgttccatgcattttagtcatgactgcccccatgagctcttatcatttatctccccaaatagctatattctaaaccttcagaaaatctctcttctctactcttcatcccaaactcactcactttgacctgatgcatgatcccaacataggcctggaacctgccttctacctttctgccccaccccattgggcaacttctttggttgaacggtctgcaaggccctggatactggctctgcccttggacaaaatcgggttcccaaatccccatccagatacagcactctgagctccacgatcttggaaggggtttggacccagccttccccagatgtatttaaacagagggcctgtcatgattcatcaagcccactgcctgccactcagatctaattctccttctttgaacaaatgataggcaagaaggtggagtgcatctccaacatggagaggatacaattattctcctagtttgaaatcatgatttggaaaaagaatgacatctggaaaactggttatgcagatgtcaaagttgtggagccatggttttataacgcctgcaagatggattcctagtaagaccccaagtgactccctctaacagagactgggaagagtgtctctaaggagaaggaggggaaaaaatatctggacaaatccataagactgtatgtcttccgtattaataactaatatctgttgagtgcttactatgtgccaggcagcattctaagcacttaacgtgtgttatatgattaatcttcacaacaaccttagtatttactttctattcttgtcctcattttacaaatgagaaccccaaggcacagaaaacctaaaatacttgcccaaagtagcatagctagtaagggagggtgacagatttcagactcttgatgctgcaccagaggacacagcatgtaatttggggagatgggggacccatagagaaagccaccttcaggatgtgtcagaaccaagggacaacaggggctgtgccctcaccaccaaacctgttccaattgatactcccgtgaccatctgtcaaaaaactgggacaacagaacaatggtcccaaatgacctctcaagtgttttctaactgagattttgtgatcctgacacaagcttcacactgtcttctaaaatcatctgcatctcttcatctgtgaaatggggataataagagttctaccttcactgtgttataaaatatataattatagaaagtaaataaattgcatagcttatagtagctatttaataaatgttacctattataagaaaaagcaaactgcaaggaagaataattgagaagaaagtgaactaaattactgagcaccaacgaaatgcagccactttacaggtatggactcacttatcctatgacaactcagtgaggtcattatcatcctttctgttttgcaagtgaggatactgagactcagacaggctggacagcttgcttacagaagcagagccaggatccggatctgacttgaagcctgattgtcctggctgggatactgggctgggagctgcggaatgtcctaaagaaataccttacctatagcaacatctcatgtaaaggatggctgggaacaggtatgtgaagtctggtcatctttgctcatgcaaagattgctcttgactccttggccagtttccagaagaagggatagtaggaggtcttcaactccttccccctgcctcctctcccctgctttaaaacaccaattgtaatttcagcttccaggttgttctcccgagatggctcactcccctgactgaaggaagacagctactccccagcccactgccactcacactcctgagcaccacccctaggtcagcagcttttctcccagggtacaccatgagaaacatgagagactggcccacatattccctccttctgatgcttgtcaaaggtagtctcttgttggactcccttagatcctcggggtgctcatggattcactgccttttcctctccttttcaggggcttgcctggagcgaaaaccataggggtccaaggccggcataatgagagctagaaaaattccctgggtttctgtcaggtccatagagttggtgactttaccacccacatatatctttgctgtcaagcaaagtgtgcaagtttgtctcttccgttgtcatcgacttatcacttatacagaggcagcaatggggcttgagatctgacaaccacaattctctgcattcaaaagtgagcacacgggtaccagaaaacactgcggtggatgaaggtgcaggagccaccgtgtaaagaatagaaattaatttctaactaaatgtctctgctttagttagggtcttagtccactgcagtatcttaaacaatacatattcaatgataaattttccataatgacaaggtgaacaaactcagaatcaaagctcctttcctactcttcaattcaacacattaccctaaaatattaattgaaatgataggattatacagcttttttttttgtcagagcactttattcattctttcagtaaataccatctctcatatctgcttaatttttctccacagcatttatcactatttggcatgctacatattttacttgtttatattttgttgtctggctctccactggaatacaaggtccttgatggcagagatgagtttttgtctgttttgttcactgctttaactccagcacttagaataactttggcccataacagacactcaataaatgtattaaatgaatgagggaatgaaatacatatgagtgagtgctacgtaccctgcactgagctggatgccagggacacagtggtgcacaaggctggtgcggactctgccttctgagatgttctccccaagcctcatctacccactaaaaaaatgctactgaccgtaacaagattttctgaagagttgattatagagtactctggaacaccaaataacttactcttggagagcagacatcgaggctcctaagtgcattggatgttagcaggggcaaaatgaagaaaatagtagctttctcttttctccaccttttctctcttttgagtcccaagggtcccagccctgagtctgaggctgtcaaagaaaaagcgaaacacttctgttttatttcacaaaggaatttcgcaacgcttctctccaaacagactggctggggcatgctatttcacaatgaaaagccacgataacacagtttcctaaacaaaggggcgattcctaactccctctcactttatcaccactgccaccaaatgattttggtattcttcaagaatacagaatccactgggtctttttgggctttttagcaatttacacatccacaaacacataggtttatgagcggtaacagcgtacattccagtgcatgaaacactgcagggattctctgaaggcgtgccctggatgctgcaaggctccaaggcaacagtcagccagtggaacagtgtgccacccagcatgctcgacttgatagaaaaaagacccagtgacagggcaaaggaagtcaagccaacatgcaattgcttgtattaatttaaataaagccaggttctcaaactccatgtttaaataagaaatctaacagtcataagttttctttttacctgcatgcatatgggagaatagggaaagtttaaattatctttctggcttaaggacaaaattgcatgagtatttataactttcagaaaagaaatgtcagtctaaatatattactagggcaacaaattattaagaaaaaaaacccaaagtacagtcttttggaaattaaagttgctttcatagaatatagcagcattcactcagtaacaattcattaagtacctcatatgtgccagacgcttttctagacacaatggaagcacagctctcagaatctcaggagcttatatttcagtggaaataaacacaaaataaaataagtaaaatatatgtcagatggagataattgccatggagaggagtaaaacaggcggggagagagagagtgttgtcagcaggcttgcagaaattacaattttaaatcaggttgtcaagaagggatacaataagaaggtgacatttcagcaaaggcctgcgtgtaggcagggagcccagtatttggagtgtggatgtttgctggactccctctgttagaaataacattttcatgcacattcttaagacataatcataccagcttttctgtaggttagggagataaggagtcattttttctttcttatcttgctaagagctctttcacaagtagttcacactttcatttttcaaaatcaagcgatgaaatgccattaattagcacaaagtgtgttggggagtggacgcgagggtttggcaaggaagcagtcctgaaaagatcaaaacttacaacatgaacaggaagatgacagcactgattattgacaaacggaaaatggggcatggcattttgagccctttgccttgagtctctccctagtcacgtgaccacattctgtggactggtgagtgtttcttccccaaccacagggataagaatacaaagtgagtgatgcatttctctcactggtccccagatgactccactctagcagccccggaaaagaacctgcagcctcatctatacctgcaggttgatgtgcctcccaaaaactgtctcactcagttgtggagctgaaatcaatcatgtgttcacctcagtggggttcttggtttttcttttctggcttctccaaaaagccaatcatagagaaacctgaggactgtggagccactatggagaaggctggagtgcctttaccatccctagctcagctttagggattcaccctccaggacctctgagtgtgctgggatcacacggcctaaggtaggccctagagtcagtttctgtctttacctgccacctgacaggagtgagaagttttacttagaggcagtgagaagggaagtcagcagccccagggacagtacaaaggagacacagcctgagtgtgtgttgtcagaagctctgtcacagcgaaggcctcctcgggcataaagacctcactgtgtttgcataacacctgtgttataatcgtgagtgatcaataaaggattaactgcctcagtcatctaaggaaatgaagaagggttttatgcaccaagttcataaataaggacacagaaaaaaaccacgaaggccagtgtagctgcctctgtacgttgaaattagagaactggtacaataacaataacccacctctgtagtaagaatcaatgtaaaatctttgagttcatagctagtccatttctcagcatcaaaaccatcattttgctttctgtatggaggacgtccacccccacatatgcacactcagagtgtcagagcaatgagaaaccaattaccatcaggctccacctctttggttgaagacatagaaactgatgaatgaagaaattaagtgacttttccaacatcacacatatagtgcagacaggtaaagtgatatactgtacttctgtctctttcctccaatatcctagaagtcaagggctaagaaaagacagaaagggtaaaccatgtgatcatgccaaagtgaaagaaaaatggcagcggagtgttctccacattccagacaactacctcctgccaccttctaggtggcaatgcagtccaggtaggtaaagcgatatacaaaaataaatagccttaatcattcacaaaaatattaatgtgtgtcaaatttaaaaacaatgaattgcaaattgcccctaactttggcaagatcctttcacctaccttaaaatggacaagtttacaaatttgggctataaactgcatataagtttttgttggttttttttcttccttgagacggagtatcactcttgttgcccaggctggagtgcaatggcacaatctcagctcactgcaacctctgcctcccaggttcaagtgattctcctgcctcagcctcccgagtagctgggattacaggcaggcacaaccacgctcagctattttttgtatttttagtagagacgaggtttcaccacgttggccaggctggtctcgaactcctgacctcaggtgatccacctgccttggccttccaaagtgctacgattacagatgtgagccaccatgcccggacacatatgagtttttataagtaagttcttttagtagtgaaaaaagcataggctctggaatcagagaaaaatagaatcacaacccctcacttcatagttctgtgaccttgaaaaatgttgctttaacttttctaaccctctattccctcatccacaaaataaggataataattgcatagagttatcataatgatcaaattaaataattgcaagtaagtacctgagtgactacaaagcagaggtgctcaataatactaactccattcctttcagcacccgatggtctgcagtagagcggtttcaccctctactccagacagaaggagacagaaaagacagaaaagctagaatgggagagaacatggccaatgaccaccagcatttttccaaaccaagaaatctaaagtgcctatcagcacattttttataaaaatacctcctcaggaatgttcttcccacacaacctctctaaatcctttccctgcactaatgatagtgaaggtcccaaaggcaagaccatcactgggagggtctagctccccaacaagagatgatgccctcattgcccttcatttgcagagatgaaggtgacacaggtcaatgtcagcttcaccaatagtaacagggagagtaattttttttttttgagaccgggtctcgctctattgcccaggtcggagtgcagaggcatgaccatggctcattgcagcctcaacctcccgggctgaagtgatcctctcgcctcagcctcctaagtagctgggactacaggtgtgcagcaccatgcctgggtcattttttaattttttgtagagacaaggtcttcctatattactcaggctggtcttaaattcttgagctcaagtgatgcccctgcctcggccccccagagtgccaggattacaggcatgagacctcacgccctgcatgaatgaattttttacatcaaaccttctccaacaaacttggttcagatgtctgagacaagagttgcacaaaggagtctcagtcttcagaaagttcatccttacccagctttatggatgctctaggacacatttaattcttgcatccatttaggaacagagatcttctcccatccttaaaagggaaactataatattaattactgacctgtgatgagtcagctgtccatcctcatttggcccatgctgtctacatgaagttagttttcactgtagtgcttggccaagaaaaaccaagtttttctaaatgaattccaaggataaatagcctaattcctgttctttggcttcttccactaaagaattatagggacctgatctagggaaactggggggaaaagccagggaatgagagccactgtcttgccagaaatgcatgttctgatgaggaaagatagttcaggatatctgcgccaaatcacacattggaaagaagctttctgagatctgaggaaacttccacctgctaaaaagagctagcagtctgctggaaagaaaaaaattcattcaggtgtcagaactcttactcttcactttgtgtgtgactgtagacaagtcagttaacctctttgcacctcagattctcatctgtacagtaaagagttcacattagattgtctctaagtttccttcagcactaacaagccgtgggacataggagaacaaatttgaaagattcctgagatacaggagtatggattcctgcagctgattcctttatgtgacccagtaaggataaaatcgaaaaaaggaactaaacgaaatacactcttgattaatcaaaggggattgaaagtcgtggctaacctcacacctaccttgcatcacctccagctcacctcccttgagacactcctcctcttctttaatgcctcatcatgattctcaaaaactgtgatcactcaaggttgaagcttttaatctcccatgtataaaaggatatgcaaatagagttcagtttcctgttgagtctctgccaaggtcttagcctggcagttctgggaaaagagccaaagacctcatatttcttggctgttaacattctcccatctgtgctcaagtcagcagcctaggcttcaggctgtggtttgtctttagtcttacactttcccaagttttctgaaggaaccctttagaatgttcctgcaagaaagtaagatacaagtggctcccaagaaaccagacagaggattatctggttatatttggaggcagtaagaaaaagaccaggaagtctatattcctatagtatatagccacagaatccaatcttgcaagctacttgaaatgctgatattaattaagtcttaggcagggctttcaataagtcatctgtgtctccaatatgggatgtcccacatcatgcatatgcacagtgaaaaaaagcgaggtccttgggtacagtacagcattcaaaaattaaagatctgaaaaacacaagacatctcagtgtgcttccgggctggaggctctgctaaacaacagaagcagagaccggactaattgtcccccatgtctctttgactgaactcacacaaaatagaatctaccatttttactcagtgcggggtacccagactcaagtttactgcaatgttgttaccaatattctaatggaaaattatatattcagagctatgttaaatttgaccatttattaaacatgaaatttctactttttctgtaagtgccttgtcttacttgtatttcccggtatttcccttctaaagctaactccccaaagggctttcctgtatgttctcacttccattacaaagtcaatgtacaagttaatttttttaatttctttagaaacctttataaagagatttcctccttcatttctctgttatcccaggcagctgtcaggagcaaagagctcaagcctgcactgccttggaacaggacatcagcaaaagacactctcaatctactcagaaggctgaggtgggaggattgcttgagccaggggttcaagaccagcctggacaactaagtgaggctcagtctcaaaaaaaaaaaaaaaagatctcaatattattgttccatacccagtcattcacttggtgttttctgcagcatttatttataaatatctcagtctgttcttaatccttgagcctatattttttaaaatcatactttgatatctactcagagtattgattctcttcaaatttcccacctcttagttctcctcccactctctcccaccctgagccttacacctccaacaatgatcattctaagaccatttatatctcaataggaaagtgatgtaaaacgggtctccttactctgttttggagggtttttttgttgttgctgttgcttgcttctctgtcccaccccaaactcatgtgtgtctgaaatttagcaccaccttgcgacgtttgtgagcatttttctcagagcagcattttgagactgagcctgaactccactgatgttatgacccttaaaagtgtctggctccaaaagactaaggagttcctgcgtaaatccaggtccagctacttcatcactgtgacttgttattggaaaaggttgagctatcaacatattgctcctgtaaaggctcagaactgaatcttagattcttcaggatatttgagtcctctgaggctcctgggtaaagactccaatgtagcagttctgtggactataaatgggagatatccagatcatacaccttcaatggaagaaaaagcactgtcaccttagacgactccaactctgtagtctacttttgtcttcctaatatcatacctcattctccagtgggtttatggcaagcctcatctactcagaagtaaccaagtacaagccaacacactcttgtgttagtgtggaggcccaaagtggcataagtgaatgtgactccagatgaaaaccttcccctctccaacacaaagatgccaaagactatgtataaagcaagtcttaaatcactctatatttccatttgaatatatttccccagttcctgtgcattgcttctgcatacacagaattcaatgataaaaattgagactgtctcctagatacagtaattaactcagctatcaatgccaattgactgtgtagaggggagacaattttgtaccaagatttactaacctctattttaatggaaaaacaatggaaaagctttcttcctactatgactctctctggataaattgcttgccaggaagcgttaggataattctgccatgactctttgtcttccacacccaaagacatttggtctccatcacatatggaggaaggatctccttgttcagcagtatttacaccatcaccctgacacccgcagtcagatctaactatacagcttggctaataaacctggagaagctcatattctaagaaaaaagtggagagtggtgggacagatggggcctgagtgctgggaaactgcccgtgcccactgctgacttggtcttctcaccagctgcttgatctaacagatgcatcttccttatgaggcaccagagaaccagaatgtccacatcctgtggtcccctgtacccttaacaccccacatttgagttcctttccaattcagaaaacaaaacctgcaggctttgagccaatttacaacagatgtgggtcacaacaaccaactacccaggaagcctccaccagaacgcagcgtgagaatcagcttcttagatattcccatacgtgtgatcccatcaatcatttaacaactgtcaaagagaaagactaggagactttctcccgagcatctccagggatttaattcactatgttggaaattaagagattactactaagccataagaaggctaagacagagttaaaagaattattggaaggttggcattacaactttacgtgtacactaggaaaatctgcagctctacctgtagctttgacataatgccttcctataccctgtccttgcccaactgtgactcccacatcatggtcataccctggataggcccctctctgcatgtagagcaatgtgaatggggattctgcttatcaggatatcatcactagtctgtgccaggccttgcaagaatgtccttgtactgcaactatttgtaccagatggtaccctggccacccctaagtgtgcagactttttaactttttcccccaagaaagtggtccctgatgtgcactgcctactgagtaaggctaagaaagataggaaggaagaggacaaagtgcaaggagagaaacatttttgcaaggagaaaaataatgatgtggatgcagaatatttatcatgtgaattcatattaacctgacttcctcagaaaatgtcaccgttagtattagaatgtgtatttccttcggagctctgaaagaaaatatgagaattcaaggggtgctagtgcagaatacacacacacacacacacacacacacacacacacacactgtgcttcactgtggctggaatgatgcagagtcttggcaatagttcgggaagctgctagctgtccgcccattgtaaacagtgaagtaggtcatctgtggctccccatcctcatctgtctgggccattttcttgggccctcctccacatcccattcctcatatgttctcattctatttccatcaaacctcaatctcaagaaatgacctgaaatcaattcgtactaatgtttgagtcatgaaaacagaggaaggctttagcttctctgagattggcagggagggtcgctagtgagcattgtattttcataaagataatagccataagctaaacactgcagcaaccacagcagaattttccaagcctgaggaacactgcccaaaatgaaagacagaggtttgttctctctttgtttggaggttcagtgtggatcatacacagagagtctggagcctcccacagtggacacttcttttcctctgtccagggagaagtccagctggagcagacaaccagagagaacattagcctgaccatggggaaaggcattgcagcagaattaggcccaatagaggaaaaaagatgcctggaaagaaatttcatttcaatagcaggaatagctttgtaagagctgatagccattcaacagtgaaacaagcatccttgtcagtggatgagttcggtggatgactacactgggaaggttgtctacattggttgggagctaaactcagtgagctctttccctcctagaattcattatatactgtatgtatatgattatatatactctgtgtatgtaatcgtgtattacatatactccatatatgtatattacatatacatatattacatatactctgtatatgtaatcatactccatatacacatttgtatccattacatattcaattttccatgctattggatatttttcctattcaataattttaataagctatgttaatattgtatctagagctacattatagtttactcaatcagttctcttcatggttgagcatttaggcaacttctaaatttttcctactatgaaaattattatgatgaacacacctgtacttacaactttttcattatttaaagtcatcatatatgtatatgatgatttggatccacttccacatcccattccttatatgccctcattctatttccatcacaactcaatctcaagaatatttcagtatgtgacctgaaatcaatgcattctaaagtttaagtaatgaaaacggaggaagactttagcttttctgaggttggcagggagggtcacaggtgagcattgtattttaatagcaataatagccataagctaaacactgcagcaaccacagcagatatacaaatggtatatatacaaatatacaattatatttgtataaatatatataaacatataataaagtaagctcctattttcttaattagaagattcaaagttaagaattttgtccaacttgaatatatgaaactttagggttatagagaaattagccaattctactttagatgttttaatgtattaatacagttaaacacacatattttaaaattacatattatataaaataatatatcaattttgaatactgctatttccttttaataattcataaaataactttaaattcttcacaggcatttcaaatcaatgtatttgttgccactagagccacttttttatcctcaaatatttttccagagtatatgaaactcactttgctaaattgaaaattaagaggcacattagatttagaaacataattttaaattgtttcaatgatggcacattattaatacctactttgagacacaatacatactcacataatattagaatcattgttttgccatttatcctgtaagtgaatattcatgatctccacaacaaaacatttactttgatagatttgtttaaacaatatcaaacacttgcagtcttgaaggcactggaagacccaaaaaatagttactacgtttctgttaaactacttagtcatctttttaactaattctatcagctgactgccataagcatccatgagctagcattgattgagatcattccaatgtgtcctcactaaactgtacttaactgttcaaagccaaataattaagtgaaagtatggtaatactgtttttcataattattgtaaggaatcaaatataagggatttcttcttctctgaggatcatgaaccttactccatgttcaaatagatatagtattttttcacagtaaattccccaaagtggaaatagtcactcaaacgaatacttttactcttttgacattaaccaaatggcttccaataaaaatcaaacaatttatatttttaccaacatcttgcccacattgggagtgtcaacattttgagcaaaagctttaattaaatatccatgcaaaaaatggtttgttaatactttacagttttattactagagggttaaaatcctttttcaagtctgataatcaatgattaactttcttcatttgtccttcacccatttgttttttaggttgatggtgttttacttattgatttgtgtaattataataattttgtgtctgagttttacagcatttaaccacaaaaacagcattggtgaaaggagtttcaggggtattgtggatggcagcgggtggtgatggcaaagtgccaaggaaagggaaaaaggaagaagagggtttttatactgatgtgtttcattgtgccttcctaccacacaggttggagtgcattaagcctttgtccaaaaacacccagccgtgacccgctatgtatgtctcagcattgggaagagtcctctgagtgtcatgggaaaataatatatgagttttattgcccctgtgtcccaattattttctgtttactccatgttggtctacagcaatagcttcagaacataaacaaatatcaccaaaaacatcagtgatgaacaattccaaccacacatttcaatgtttactaaatatacccgtggcactgtaaaaaagaatataatggaagagtaaaggaattgggactgatcgtgactgagaacctgtatagtaggctacacactagctatatgatgaaccaagaagttgaacccaaatctaactaacttacataatcccttcctttaaagaacttaatgtccagtgcaaagcaagtgttcaaaaaagtgtttgttgtgaattgaattcatttcattggaatacagcatgcttgcaaagtcccaactttttaaaataatgtgtttctaaagaccactggtctttagaaagaccaatgaccaaagaccttagaccattggtctaaggaccatctggaagcagatccccaaggtgaaattctgacgttgaattcccaaatctaacaggtcatgtgccttgttctgatgagaaaactgtcgaataagggagtagcagtggcatgaaggttgttagtaggtagcataggccaaatggcccagtgatgtgatgaaaagtgcactcctccaaataagaccctagttactagaaagtcacaagtaggtaaacagatgccgggagggacagtttttgttggataaagtcagcagagaaaggcttttggaggagatgaatcctgagctggtgtctacagatagtgacagacttagtgcgactaggaatattatggagaataaaagaatctccctctctaactaatgccaccaagcagtcccttcaccccagagcaaaggcataacctatcttcacccaagtgaactatgtattcttgaaatatatctccttggaactaaaccatttttctgttcacttcaaatcaaccagtgttaatatcatagatctgacagcttagaaggcctgtgttctccttcactcttctcttgaccctatgtgagtttgattcaagagcatggggattagtcccttctcttgaattacaatcaccaatcagcacaccacatccagttgctctttttaagtctaggagagcaaaaacaatgcacaggtgaaggaaactatgcctaggcctcatccctaggttgtacaaagtaactgaatttatggcttcaaggacagaataaatcaaataaaatcaaagaagcccattttcagggaatagaaacaattcacagaaataacaccttgaatgaaattctcatttttagtgcagaaatggaacataacattcttagattacttgctttctaaaagtgaatattctttaggtattactttttcaacattgatgagtttacaacatttctttttgcatagcagacaaaactgtgtaggcattcacagttacagaaagaaaaaatatgactagcttcctgcttcacacaaagaaatcatgcaaaaaaaaaatttcaagccaaaagaaaaaaaaagttttaaaacattttaaagtctcatattacttgctggctgtaatgggaatgtgtaactttgtgaagatgtctgtagccatcttattctaatgatcacttatctttatcaagccattatgtccatcttgacatgatgcaatacacagggcataacattacctacacagtatttctgacataaataaataaactaaaactaatcaaacttttagttctaacaggagacaggaagctagaaaagcaaattaaaggattctacaaagaaacatctagacaaatccagcaggtgagacattccactggacaacaggttcagtcccaccaataatcaatgtcatgaaaaggcaggaaaaaagtgcagtagaggggaagcagtggaaggagaactattaaagattaaagagattttaaagatttaacaacaatgaaatgcacagtctttgaatggatccttgttttaaaaaaaaaaaaaatctgtaacagaggccaggcatggtggctcactcctgtaatcccagcactttgggaggcagagactggaggaccacttgagcccaggagtttaagaccctgtgtctgaaaaaaaaaaaaaaagaaagaaagaaagaaaaaggaaaaaataatctataaaagacatttggagcatttggaggaaaactaggaaaacttgactatgggttggctattaagttattttcgggaatttctgttaactttgttaggtggaaaatggtattgtggttgagtagaaaaatatccttttttgtaatatatactgaagtgaattgtcattttatctgtattttttttaaatactcgagcaaaacaaatagaaaatgtgacaaatgttaacaactgttaaatctaagtgatcattctatagatacttattttattaatctcttctttttggattgtttcaaaaattttataataaaatccttttttaaagtcttcattttgtgggtgggcatggtggttcactcctgtaatcccagcactttggggagccagggcaggtgattgcttgagcccaagagttctaaaccagcctgggcaacatagcaaaactctgtctctacaaaagaatacgaaaatgtcaccaggcgaagtggtgcatgcctgcagtcccagctactagagaggctgaggtgggaggatcacttgaacctgggagatcaaggctcccagtgagccatgagcatgcctctgcactccagcctggataatggagtgagaacctgtctcaaaaaaataaataataaagttttcatttttaaatggccaacaagtctacagcaaatttaaacaatgaaaatatgagatacaatatcttccttaaaaattagcatattttcttaaggaatactgctctgctcgaagaattccctagttctgtaagcgttcgaacaaattaaaatcttgtgtttatataacatatttctaagacaacaatgaattctgtcactaactatatgagtaaaatgaacaagaaaaccactaataatgatggtgcacattttagattccttttattctttttcaagacacagacataactgagatatcttaaaatcactgactttcaagatttgagataatgataataactcaagatcaagtcttccccttgtgttagaagtgggggtgggacagttccagacttccacagttgtaccaatgaaccccaatcagatgattttcaagttacttctccttcaggtgggtgggcatcagagagaagctaagagaaggttttgacaaaatccaaagtgtgtccagacccctcaaataaggtaacctgaccaagtttaatacattcttagggcctaatatggatctcagttaaaaatcctggtctcttttaattcttgtccagttgctaagtgtattatttgacccattaactctgcaagtcatgttggtccattcttcttctttacggttttgcaaaatacatcaggttacagtttcaagtatctgtcacttaaacaagtaagcatttattatttttaatgggagggctaacatattgccacagaaatatagtatgggtactgaagaaaatatacacagactctcaggtcatcactgagccttcccaccatcatcatagatccagcatctgacttccagagtaccaccaagaagaaatcagaggcagatgacatacatatccatggtccttgactctagagagtccagccaaaatgtgtgggtccatttaatcatttctacagaaatgggaggctattgctccaaatgacttctaaccactcactcatccatcactcaaagcatatgatacaattgatttaccagtcattagtaggcaggtagagagtggtgaagcagtggagagagcttggtatttacagctgctattgcaactttggtagcacaaacaacatggaattaggacagggattttcaaagtattgcccacggacttctgagcacctcaagatcttttcagggagtccatgaggtcagaatttttttcataataacagcaaaacattacttgcctttttcgttgtgttgatatttacactgatggtggaaaaacaatgatggataaaactgctggtgccttagcatgaatcaaggcgggggcatcaaatctgtattaataatcatgatattcttcactgccacatattttcaggggaaaaaagttagtttcacttaaaaatgatactgactgtattaccttgctagggctgccataacaaaataccacagactaggcaacttaaacaacagaaatttattttctcatagttctacaggatagaagtccaagatcaaagggctggcagagttggtttcttctaaggacccctcctccatctccaggcagacagcaggcttgccgctgtgccctccagaaaggatggtctttcctctttgtgtggggaacactggtgtctcttctcacagtgtgtccaaatttcctcctcttataaggacatcagtcagattgaattagggccaactttaatgacctcattttaacttaataacttctcaaaaggccctttctgcaaatatagtcacattctgaggttatgggatttagggtttcaacatgaatttggtggaaaacaattcaacccataatactgacaaagcaataacaattattaattttattaaatctcaactttcgagtacatgtctttttagtattctatgtgacaaaatgataagtacacataaagcacttctgttacattccaaattatgattgttatctaagaggaaacacttgtgtggttgtttgagttgcaagctgaactagctactttttccatgaaacacacatttttgcttgaaagaacaattgacaggcaactatggttattcagacttgtagatttgccaggcattttcttaaaaacaaatgaacagagcctgtcatattaaaataaacaacttatagttgttgctaattataaaatcttttttttttttttgacagagtctcactctgtcacccaggggggagtgcagtggtgcaatctcagatcactgcaacctccacctcccgggttcaagtgattctactgcttcagcctctcaagtagctgggattacaggtgctcgccaccacgcccagctaatttttgtacttttagtagagacagggtttcaccatgttggtcaggctggtctcgaactcctgaccttgtgatctgcccaccttggcctcccaaagtactgagattacaggcatgaggcactgcgcctggcctccaccagtactctttagcctctgtcctttgagatgaaaggcgtatatccagggagtcattgccacttcaccctgacctctagaatgaagacacataaaacagacctaaatccaactcacatcttgaagccaagtccaggtggcctgcagaccagtgagcaaaagtgatacatgtttgttgctgtaagcaattgaaattttggggttgttatagatcacaattacaacaaaaatagctgattaatacagatggtgggtcttgagaggattctaccttcatatgcttttaactctatgtctctagcaattatgaaatggcatacctaaaatttttggtggtttcctattatcctcaggacaaaacagtatagcttacttgctcccttaaatgcagttgcattgaactacttacttcctgaatgctctgtgttctttcatatttctttgcttgagatgccctttccttcttctatcccccaattggtccgtagtccctctgtattttcagggtcttagctcagttgtttgcttccctgcgaattcctaaatgactaccccagtgatctgggttaagtgctcacccttttcggaattttcatagcatccagtacttatctctattttcgcactcaaaaccctttttctttcttcttcattaggttgagacccttgagagaagtgatctgtcttgttcatccctgtataccatgtaccagcacagagcctaacccagtgagtgctcagaaagtgccttctgaacccattttaaggatgaggtatctcaggttcagggaagataagctagtaagtgacagagccatggccagatcttcccaactcccaggttctggctcagtgcctggtactaggctgccttatggaatactgccttaacatttgtttagtggtattaaaacacattggtttttaatattagcctgagttaaacatggttggtaagtttaatttgttgtgatttactccataccatatactatattctaaagctgtatagaaatgagtttcacattgtctacatatttggagtattcaagtcatgttctcttccactaagatcaattgcatctctggagaggaatcctcgaatgccacagctgggagatgtttcaaagatcatgtattcactctcctaggttttcagatgagagagtctagaaagatccagagaggtttcacaacttggccaagtcacccaatttcaaaagaacttacaagaaattgggtatctctatcccagtgcagtgatctttttggtacactaggcgaatgtcttctttggtctttcattctggcatttatggtttgagactgtttcagcctgtcagtggatacccttccctggagtggccctaggatagtctgggcaacctggtcctttctttctctgtgtagattttaatcgttatgtgagatgctcttctgcaggaatggggaagagcaggcacaaggtggatgaatcctgaagttcaactattcctggaaggagactgtgtcatgttcttttttccaggcaaactcattttcagaggaaagggacagtgttggaggctgagttgactgtggtacagttcagtcctggctgggttgaggtctcatgcttgggagcaaatatatgggatattaagccaagaaatgaaacagggattaaacaggggcatcctccaggcttagaatatttgggattgtgaactttgagctagtgttatttatctctaccccctgcttctggtattaacacacacggtttgagagttgtagacagactacggcgtgttttaaaaaggataccaggttgtttaacagacttcaaaccatgtcctgggaggaatagctaaaacatatgggagactgtagaccaaaggaagggaggtatcatagtgatcacagtcttcagatatctgtcagagaagagctggcatatcagaagacagttggattctcatgtctgcttatgcactctacctattgcagtatgttggtttggttgaaatatatgagaaaaatctggcctcacatagatatgtagtatgaaaacaaaggagtattttaatagcttgttcaaaatattgtggacatgatattctttatattgcaccataattatttgacaagaggtagtttctttgaaggttagttgcaatgtgaaatctgataccatcttagtgaacttatcatattctgttacattaaaacattggtttatcctgaaatttggatagaacgttcacccatgcatgcttcttaacccatccattagtcacttgagaaaattggttcgctgttaagcagcttccacctgttagcacacattttattattcaataccaaaatattacagtagctaacatcatcactggtctctttaagtcaggaaaaatttttaaatattggtgagctatctacttcacagtgacaaacataaatttcctaaaactctaatttttcctggaagcttagattttctaattagcaggctgggcacggtggcacatacctgtaatcccagcactttgggaggccaaggtgggcagatcacttgaggtcgggcgttcgagaccagcctgaccaacatggtgaaaccccgtctctactaaaaatacaaaaattatctgggtgtggtgggagtggctataatcccagctacttgtgaggctgaagcagtagaatcacttgaacccaggaggtagaggtcgcagtgatctgagatcgcaccactgcactccagtctgagcgacagagtgagactctgtcaaaaaaaaaaaaaaaagattttataattagcaacaacttagcttaggaggctgaggcaggagaatcatttgaacctgggagacaaaggttgcagtgagatgagatcgcaccactgcattccagcctgggcaacagggaaagactccgtctcaaaaaaaaaaaaaaaaaaaaaagagagagtgctggtggaaacccattatgtgacgtgtcttgaagcctcagcttagaactggcacaccgtcacttccactcatattctatgaatcaaaacataatgaagccccaatgtcaatagagcctgtagtaggaagccctgcaaagtcccatggcaaagaacctggaggtacacttctattacagggaggaagtgaagagttgggaagctgcattctcatcaggattcccaacttctgtttcctctaactaatcctattcacaccagtttctgatggctgcttcttgggaaagtcaccagcactagaaggagctcaatgagtctcatatgggtgagtcagaagcttatttcatcaatcagctacctcttgccatttcaaagactagtacctaaggccagctacactcaagagtccaagtgacagttctttattctcacctggttctccccatgaggccttttgctgtatgccatcccattacatcgtctgttattgaagccataacatttcttatttttctcttttcctatttgcttttttttaatcagcaaaagaatgttagactttatatagagagataacgttccttggagtttatggggcaggcatgcagctgtatgtagggtggaaagtcattacaaaggtcataggtaaaatagtcataattaaatcaaaccatggatttggataagactccagggaaagtgtgaagagtaacctttttaaattcctgctccctgttgataaatagcaacaacaacaaaattcctactcttctttcatggttaaagtttaataaggtcactttcgatgagcctatcacctatcatattgctttgttttgacagcactagaacagagatcaaaggcaaacaagaccagtgtcttgtgagccctgaggagaggttttgagaaggcaatgactgggtcaaaactctgaggtcaaacaagattaaaactgaaaatcatccgttgaatttggccagagctgctgcctctgattgctcaggttgtgccttcacaagggcatctggcagagaggagaagtggggctaaaattcaatgcgtgctctgccgccagccaaggccctgatgtggcgttgcatcttccggaaagggaaggccttttataaaccacacaaaagtgcaatctgttcgccaagcttgaacccaaggggctatctctacattcacccagcagggctgccttttctaaatcgcacaaagcaccatatgggctactggcctgaatttagcaactgggaggaggtcaatggaggggacacaattttaaatttacatgaaaaccctttgtaaactgtataacactattcaagtgtaaagcaggaagaggtgattcagaagcttagcaggtgacaggagaaattacactgaccacaagccttttctgcctaacccacagcatgtagaatctccatgagacgtttaagtacccgacaaactcctcagtgggaaaccatttgagggcagactggccagaaagcacagatgggaatggatgtgattatttctaaaagtccattctagtcacaaaccccaaggcagatctagccagtggggcagaagagccccagacagaagcacctgagccagcttggcctgacctaactgtcaggaccctttgatcttgctggagcttgacttggagaaaacatctggttctggggattctcaggggccatatagtgtgaaaccgaggggaagtttttgtaaagctctgtagcactgtgactgggggatacgcacagtgctacaaaacctacagagacctgtacaaaaactgcaggggcaaaagtgccatttccctgggatatcctcaccctgggtcccatgcctcaggagacaaacacagcaagcagcttccctccctgctttggggcctggaagggatagcaggaagttgactggaccagggagatgaccacagctgctgacctctcactcactgctgttcttccttgggtgaaactggcatttctacattttcttacagcacatttggggaatacaaaaaggcctttcttaaaaactattcttgtcttgttttcatgttgattctattgcaaaagagagttatatgagccacctcatacggaatttctaaattcaaacctctagagagatttacccaagtgctttgctttgcagtttgggaggatggatttgaagagagattgatttttttgtaggcaatcaccggccacagttgctcattctaaagctgactgctctgtaaatcacccagtgcttcatgccaccctttctcctcttgctgtgccacacgttatctgcctttaaagcagcagcactggtgtctgtaaaggccttaaccctggagtagtcatggagccaagacccacccctttgacagtgccagctttccaacacagagagctgagtatgggtctaggaagtgagagcaatgtaaaacaatagaaagcaacagttcagagcactgcatcaagtgtactgtgctggaaaggtccgccataggaaatatggtcctccatactcctcagacaacagccttccgaaagcaaacctgtccctacctgcagatgattaaccatctatgaaccggctgggtaagcaacaagtgccatctttcatggagctgagccttaaagatcctccagtcctaaagctgacgggaagaaggtaggtgggagcagcgctgaggtttttggaacgtcctcaagtgctgtgacaccgataaactcatctttggaaaaggaacccgtgtgactgtggaaccaagtaagtaactcatttatttatctgaagtttaaggttaaggcatcctccatctaaggaggcagaaataatcctgaaatgggaaatgggtgaaatagctagcatttaggaggactcctgggaagaggtgaaatatggttaatcctttccataggagaggagcagaaggtgtctgtaaaaaaagagtttggggcatatgaagggacccttctggctcagaggaaacagagaactctgcccagtccatcgaatttgggtcaggctgtagaaaccacagagtcattggcccaactccctgagcagagtcagaatggacacagaatgaagctgacttgagtccaggtggttttaccaacgtgattccaaacgttctgacctcccttatgccaaacacatcctcctggaagagctcagaactgaatccgtctcctgggcatggagggtggggcgagcgcaagtagtccctggtgttgcgatatttctctttagaagaaaataacctgtttcagacatttgtttctaattgtttgagctgcaaatgaaaactaggttactagtgagaaatatgggacattctggttcccactgagaccagattccaagcaggacaaagtgaatgtgtagtgcttccaactaagaaatgctttgaagtctccaggacacagccaggagagttccctaccactcaccagtgttcatcgtttttgcaaagagtatatggtgccagtcacttattaacagttatgcaagaatcaatgctaaggttgttgaaggattgtgctcaacacagaaggcatctttggtgtcctttcaatgacatttgaattcgaccgtgtcttgctaaaaaataaaataaaataagacagtggtctccacctggcagcagattccagttagatagtacatattaatcttaagtaagaaaatgtaataaaccaatacaaaaacccatttcgaaggtcctagggaagtctagcaataggggtcagtggtcccaaatctgcccaaccagctgttggaaaagaaacagcatgccctgccctggctgggactttggcactcagctcaggtttttcaaggtaaaagaaggctctagagagatagggtggtgatggtgggctcttctcagagaccaaatggggacaaagcagttccaggcatatgcaggcaaggaggctgaggaaggggaaggacaggcatgagcaacccaagacctcacacactgcagggagaaaaggggcaggggccctgccgtcagggagaaagacacccaaagttgtgctagtggagtcagtgcagagatgttcagacttttttaaaaaatcaacatcttagtaagattttgaaattttaactaatttgggcctttgcctttagaccttattatccttaaaattttcactaaaataagtttatccacaattccaacaaagctaaagactgattatcctaatttccctttgtttgccaagtaagggatgaattaagttcctctgtttacccatttacttggtccatatttccctaactgcggagtgcacagcacatattttcagatggagagacgttctttttatttgcatggatctatcttttaatggctatcagaatagtacaactaggctatcaaacccatgtgatttcaagtttccttttaattatattttaagttaaaaagtgaataaatttttttaaattattaagcaaattatgacagatgactatgaccaaaaaagcgggggagatgtgcttaattgaagtttgggaagtgctgaacttcatattggtgcatttcatcagcctttgaagtgaaaaagtaaggggtatccagagggggcacaacctagaatatctttgaatggcagcttctatttttaagctaccaacattggattaaagagactgcactgcaaacccagggcctttatcttctcagaagccttttgatgctttttttttccttgggagcttctttcaagttcttacttacggagctcctgggtagcacaaaactaacagaacaggtctatacaaacccacagctgtagatcccacactttagtcctctggatacagtaaacctggagagaccacttagcttcgtaaaacagaacagagaaacaggacaaaacagcatggaataaagtaatggaaacgtgtacttctatggtaacaacagcggcagtggggaaaagaggcatggtcgttgggaacatctgcgtggaagtgggccatgtgatggactttgaatgcaatctattattgtatgtcacaattatgtaactaccactttttgagtgcctaccatttattaggccactgggctaagtcctttaatgattatcacttcactcagtcctcactacgatcatgtggaattgaggtaccatgacttgcgttttatggatcaggaaactgaatcttaaaggggttcctcaagatcacacagcttagtaaagtcatcatttgaatcacctgcttgatgccagcatctgtgctcttaagaagtctgctcttccatcagggctgcagctagactagggcatgtgtggaggtttttcctgcctggcccagcctctgcctcaggtctctaatgagctccttttcaagctgaatcagaaacaacagttatgccacttcccttccagtgccatccccatcacttctctcaccaaggaagaacttctgaacccccgccaaaaccagttacccaaagcagcattccccttccccaggaggagccaggtgaggcccatctctcacattacacccctggagacccagggtccctaaatacagaaaggtccagacgatgatcagagcatcactctttccctcaagaaaaggagtccacataattctggcctcatcaaaatgtttctcagattccaaaagatgaccttcccattcctccaggcccactagcccttggcctggcatctggcactccctctcactcccagtcagcatctcccagaacagagcctttgcacctgcaagtccttccacctggagccattttctcccagggactcacacagttttctccctcccctcctccaggtctccactcaaatgtcatttccagtgaatcctttccctaccacctcatgtcactctgaagacccctttccctgctttatttatagccctcatgtctacttgaatctttatatgctcgtttactgtctgtttcccttgctctgtgagagaaaggactttgagttgtttcttactgcacctataagtacactgaaagcactaaacaaacatttgttgaatgagtgaatgaataaataaaggaatgaatgaatcagagaaaaagtcagctatggtataaagcaaaagaaaagaaaaatgaagggaagctggtaacctacagagccgagcctgagtcctggctctgcaacccatcacaggtctctgccacgaagtgccaggcactgttctgggtgccagggaatcgacatgaacaaagcaggcatgaacttctgccatattggagcttattttctaatggcaaaagacagatggtaaactaaataaataaataaaaaatatatacagtgcgttagggtggtaataagccctgagaagaaaaataaagccgggaaggagaataaagaggactagtgggagggaccagcatgcagttttaaacagaagagtcacagaaggtctcactggaaaggtgacagtggagcagagacccgaggaggtggtaaagtgaggcatgcagacctctggagagagagcacttccaggcagaggggacacagggctgcctggggtgtgtggctggaggaggggagggagtgatggggagagaatgtgaaaatgaggtcagattggtgatgggttggggagagggtggcttgtaggccactgtaaggactactgcttttggattcgaaagggaagattggggagtagaatggaagtcacacgtaacctagagaaaagatctagagagacagaaacctgaataccagtcctaacccacggccctaagaagtgggcaccctcttcatatcacataacaccaaaaaatagcttctgttctttttcagcaacctgtcccaacaatccttcctgcttgggagctctgttcttagtgcaattacattccccacgcttctagtaaaatgtatcttctctgagtttagccctaataaacattctaataattacatcgagtctctctagttcacagatgctgtatctaatcttataacctataatacggaagatgttatcctcacttcgtagagaaaccagataaagctcagtgagtttaaggaacttggccaagattacacacttggaaagggacagagtcaaaactaggttttggatcttctgacatccttctactttacaacgactaggaaccacccttcatgttagtgattctccaactatcatctacagtcttttaaggattgtaaactgatccgaaaaatccatattccctccttggtttttatgagtgacatacaggcaatctcatagattctgatgttcacgtataacagaaattaatttaactgtcacttctaagtgtgagagtgtcattgaagcttgctaaaatttgatatgcatgaatgtgttattaaaatggatggaaaaacttaattctattttgtactaagcagtttggctgctgcacaatacttggcaatgatgcaaaactctcagatatgaaataaatttcccctaaaaggttggaatgcatggtatatataacctgctaggtccctgcctcacctaagtgtagcccgaaggtggagaaccactgctctatgaccaacgttccacccttctttcctcttgatcaaaccaaaaaacatctttccagtctatattcattctctcttatttgagcacaaattctgtcagattgtaatatgggcaaaagcttggatttctatttgatgctagagtcacctcttgttccatcctgaaggacaacctctaagacggaggagaagaggctaggccagatgggacagaaaatcacatgggatgaatatcatgtgacttggcaactggggctagggttgccgtaaagggaaaagcaaggtagtttttggattaggtatgtcagctgtgccagacccctgatctttggcaaaggaacctatctggaggtacaacaacgtaagtaacctacttttccttcttatgaccactatgtttggcaattacatttgttaaatatttttctaagtcaccaggttaggaagcagtgctccagtaggtaatatagcaagggatggcttgaggaacaggaactgagtttccgataaaatccaggatggcgtctgtgcttcagtgagccgtcttgatccattgtccttcctagagagtttctattccctctacctggctccagaaagctaccctcctcaacatctatgcatccaccatgtacagatctaggccaccactgtgatcagactcacatgacagcacttcggggggtggacacaaggtgaaatgaggagcacgctgaaccagtaaatcagaggccaagttccaatctgtccaatgcattaactgacaatgcattagctgacaaactctgtgacttaactgcactgaactatagtttccctatagttagatgaaggatttccaagctgtcttccagcccttgcccactatgatcctgattatccccagaccaattcttatgaacaattgggaggaaaagcaaggaagcccaatggtgtgactgtcctattacccagtaggaattctgtgatttaatggaaaaaaaaaaaaaggcactggaaagggagtgaaaactctccctatgcatcccttaattagcccttgtgtgatcacagaggtttggaaaaatgatgccttgaggctcctttcagtcctaccatctattactctggttcaggggctggaaactggaaattgagtgaagcccaactcagccactcacttaaccacctttacagtgcctttgtctgtgagatggatctaaaaatatcacctcatagagtttatttcaataactttgttgaagtagtataaacaccagctgtttaagtaggaaagtatttatacaaatcatagtcatctgtgattattatagtcctttggatagaccccaagtcttttgcatcaatggctcttgctccaaccattgtgtccttccacctctcgctgaggcacagtcctgttgtgattgatttagttgaggcttgttgttacgtttctgcctacaacggccatttggcaattctcagcaaaatatgtgaaaatgttatcctgaagcaagatctgggagtaagagatggcaggttgaggagataatagcagaaaatctaaggacttgcctaagtgtcaaaactcagaagatagcagacatcaaaaaagctgccaaaatataatgctcagatctcagaaacccttgcaaagctctgtctccagctacacccattctgctccacccacccacttccaaacagatgaattagactgacagggagcaaataggtagcaaggtttttcgtaatgatgcctgtggtagtgctttgacagcacaactcttctttggaaagggaacacaactcatcgtggaaccaggtaagttatgcattttactacagctcagtgtgtatatttctttagggttgttgtagcgtagtcctgaatgaatggggcttcttgggaagtaaagagttccaaattagaaacccattgtttgttgcaaacagtaggggtaaaatttgggagcaaatgcattagatttctcttaagaaaatattctgtatatgcttggaaactccattctgaggcttggtattcataagttttttacaactactgaaaaaaagccctaggtcaggcttttagttttgggctccctagaaccaggaaaaaggcaagctgtggttgaggagggtctctccagtatttatgagggataaaagtcatggtcacagtgtaggaagagggaaggttagaaagaaaaaagtattacgaaagaaggagttttaaaaagaggatctttctctcctctctctctctctctctctctctctctctctggataagaagccaatcttgcccttgtcacttttttctgaacttgcattaaaccaacataaatggttcagattaaatggttctcaaggtcccatcctggcctgggtctgctgagagcagttatgagctcacctctcctgttagccctgaaactgggaactttgcacaatggttcaggagcctgtatccaatgtagaaacacagccaccaactccaggacaatagagaagtcgtggtcccctactggagacattgtctactggtagcctactccaatgtttggaaatccaggggctatattctggtagtttgggtagctgccaacagtcaatcactaagaccagtccagagaatagccttcagacaccttccaaaatgccaagtccattgggagagccattacctcttacatgattaggtattgattttgtttattcagaggaaataaataagtagggaatggtacatgaatgtggctaggctatctgaccaaaagtccaaaaagtgactggtgctgtcaacatggtctctgcctctcagagaataatataaacttatagggattctccactgcctgttgcctccagggaaatggtagaatttggtgagttttcttatctttgaggggagagagactagagcactgaaaaggagggaaacagaatcatgtcgtagctgattgtagtctgattgatgtttagcaaattgcatctgagcaaaaactactgtgtttcattttcccctaaaatcatttccacttgaaatttggaattatctgcagtgttagaatcaaatctttgaggctgtgcctttgggagtcttagggaagaaggaaattgatgaaactgatgcttagcccctctgccaggatgctgaccatgctccccgatgacactccattcgcttctctggttttcttctcctgcagtggtgaaatgtaatatgatgatgtgaagctcaggtaggggatgtgaaaattttcaaatcaaaccccaagtccttaaagctttgacagtgaataatggccctacacaactgtcattctcttttgcctggctctagcccaacgatcttgatttttggtgatgaggcagagtaattcacatggtctttatgttacattgcacatgatgactatatactcctgaaacttatatctggatccagagtcaggagaaattataaaacaaaaataagcaatgcaaagcaagcactggcttctctgacctgtgtccatgacacacagcaccagtgggctccctgagcagtgaccaatttcttgttcaaccctcaggtccttagaaagcctttcgccaagctcagggaattagaaagcaggttcgttattattgtgagactcagtctgagtgatgggggaaattaggtttctaatcaaaattctgtacttgtgacccaagagaatggaaccagagtataataagaatggaaactctttctataaccctcctctcctcaacctaacatttgttgtaagaaaggtcaagttaagtgccccatccctaccctcaagctattgtgttcttcttggatgcccctctcaataaactggaagttagattttccatcatgaaggcagctatttgtcacctgccaccctcttctcttgctctgtctcagccctgccctagtatctcttggatggggatatcaccctcacatctctatcaagcagttcaactattattagcttcaaagggaactgagactctgtgtactcagccccttggtctcatcaagagcagctttgtagttctctgagctgtggggtctctaggctgagaactgaggctggggaggcagggcacagatgttacagctcaggccccagggccagctccaggctagttacctgtgaggcactgtcataatgtgctcctgggacacccgacagatgtttttcggaactggcatcaaactcttcgtggagccccgtgagttgatctttttcctatatttctgggataatttgagtcctggcactggggctgcaatccagtttgcattataaattataactagtaaatgaaattataacaaggagacagagtattacagatgtgaaataggccagagtgaacacactagactgagtcacttaagtagctctgtaactctatttattttaatatatatactctatattaaaacaatagctcccatttatttctgaaatcttcagagcagcccaaaaaacacaaagaaatctagaagaactacactaagagttggagcattcaggtgcaagggagacagtgggagggatacttcagccccaattcctcaggaagctgcttcatctctgcacatccctttggctaagctaactagtatgcgtgcctccttgcaaactgaaaacaagtgtcctacagcttggaagattctggagaaaggtagttagcatggtcagagtaattaggtagaacaaacttttatttcagggtttaagttaaatcccatattggcagaaagtcttgaaattctgagtgacatttattacagttgttgcaattcttaggggatcagtaggactagctatgagaatctaaaacataggtgacttctaagtttataaattaagaaagactgttcaggaatggtacacacttttttggtattgtttaccagcacataaacttagcaatgtattggtgttcataaaaagagaaagtctgacaataaagcaattttccaaagaaataacacttgaaacacatgttgcaatgtaattatatttgtggactaagaaaaaaagactacaagttcttcaaagataaacgattaaatctttaatctaaattctggactacaatttcatacagcttcacgtctgggtttaagtcaaatacaaaatagactaggatgcatatggcaactatattgagtgcactccagtttttaaaaaggtttaattcagtcagacacccatttctttggttaccaagatgccaaacaatggattctataagacactttctttcaaacaatcgttttgaaaatataaacattaatgtagaaagagggattcagaaaaatgttttatcaaatcaatgtattatgctctatctgaaatgctgactaacagagtcagagcacaatatcataagtgcatgaccttcttcagacatctgtcttttcagttatattgtattattcaaattactcaaacccaatctccccagcccaaagtgatgatttgacaactgcctgatgaatttagcttttaaaattctagcaagccttaattatccaactaaatcagaccaggattaagagatactcttaaataaacaaggagatagggtgtttattttatggacaagtttcttttgtaacttgtaactcccttgaaagtcagccagagtatgtctcaaaccaaagtcaagatagtgagcaagaagtgttgcacttatgaagggaggtgagtgagcaatgcatgtggtttccaaccgttaatgctagagttatcactttctgttatcaagtggcttcagctatgcaaggaaaccaaacaggggaagttttctcaagcaggttgaaagcaggttccaagaaagccctttgaaaaatgtctaatcctttcaattgtctagaactaaagccaaaaacataaggaaccagattcttaggaataagtttcctgccctgagtgactgaaacagaatcagtcttttagttgagcttctcagcagaggaaacggggagaatgatgatggtagtgatggggggtttctctgaatagttgattttctaggaaaaccatgatcaactttggtccatttacaaagccgtgatcagcagaaacttcctgactagcaatcgccccctctcaaccagatataaccagttgatctggcagtagctctgctgctgtgaacctcacagctgaagcccaaattcagattcaggataaagcattagaaaaattatttatttttatacagaaaattagccaggtgtggtggtgtgcacctgtggtcccagctactcggaagactgaggctggaggagagtctgagccaggaggcagaggttgcaatgagttgatattgggccacttcactccaacctgggtggaaaagaccctgtctcaaaaaaaaaaaaaaaaaaggaaaaggaaaattacttattttccatttacacattcattaccaactttctgttcagcaacacctaatgtcttgattatagaccatagtaggtaaaagtacactggaattcaatgtatttttcatttgatatcaagaagcaaaattcacctaagtttcaaatactaagggccaaatttacaggagcaattaatattaaaagtcagcattaaatttaggattgaaaaatgtatcttgatcatcattcacaggttggttgtgtttcttggtttcaggtattaacagggctctttctttaacagttatttgaagatagcctaagaatttaagtccccatggacacaacatttatcacaattcaaaaacttcagtgaggcactgtgtgaaagaatcatcactacctctctcaaagcttcaagacttgtggtcttaaggaaagaaaagtatgcatgtacagggtggtagtccaaagtgaggcacaaaagaagagaaggccaggagggaagccaatcctgggaccaacattccacagttcctcttagattaaaacaagaatgaacgggcttcaattggttttatttctttaaggacttcctgaaaatgatcattgttatcctctgattaaagactcaaaggaaactatacagtagtcagtcccctacagaagaatgagtattcacctaaaggcagaaacatgtaccacctaccttcagcagatccctttccaccctttccagcagatctggaagggatggcacccttccgggaccccaacactgccatcctcagaacctctgagccagttatgcagtccttctcagaccctcgattctttaagtgacagaatgcatagcatgagcacctgccctgatctaccatccaagggcccatgcatttacaaaaaaccaactggtgcagagagatattcagcctgacctagattgtccagaggattgattaataaaacacagataatcggctggatgcagtggttcacacctgtaattccagcactttgggaggccaaggtgggcggatcacctgaggtcgggagttcgagaccagcctgaccaacatggagaaaccccatctctactaaaaataaaaaaaattagctgggcatggtgatgcatgcctgtaatcccagctactcgggaggctgaggcaggagaatcacttgaacccgggaggcggaggttgcagtgagccgagattgcaccattgcactccagcctgggcaacaagagtgaaactctatctcaaaaaaaaagaaaaagaaaaaaaagaaagaaaaagaaaaaagccacagataatcgaaacccagatgatccagaaacttctttgtagttgtcattttccatctgtgcttccagccctatctcctagcagctcctaactggaagtcaaacttactgcctttcatttctgctccccttgcctgtcctttcacagaggtggtaataagcccaggtcactaacaggatgcatggaggtctggattgtagtgtttggctccagggtaatcgaggtaatcaccactgtttaacccccacaaagttgtgaataatcatctcacctaataagttgattatatttgcaggaagtcagcctcataccaaaccatccgtttttgtcatgaaaaatggaacaaatgtcgcttgtctggtgaaggaattctaccccaaggatataagaataaatctcgtgtcatccaagaagataacagagtttgatcctgctattgtcatctctcccagtgggaagtacaatgctgtcaagcttggtaaatatgaagattcaaattcagtgacatgttcagttcaacacgacaataaaactgtgcactccactgactttgaagtgaagacagattctacaggtaggccatttctagcttcaaggagctggagattatggggaacaagaattgggtgaaagggaagttagagatgtaactgtggacaaatcattctcagtatagcatcatgctggaaataagacttaggcccaactatagcctgccattggcaggggagggaaatgcttgtcatccctaagatggaatctaaaataaagcccatcttatttcttcctcatctctcctctttacctaccactgtccccttcatactagactctgggattgaaagtcctcgtgcattctaatccagtgctaaattccaacaaagggcaatgcggcctattgtggggctaagaatcctagttcttcccgcatattggtgtgcctggatgttgacctcatggtacaatgaaaaaggctagaatgggaagcatgttgtataattagctatgtgaccttcaccaagtcacatcctctggtcctcagttcactcacccaaagtctcctccagttttaaaagcctacaatcctgtgagcctcttcattcccaatgtaaccctgaccactgctgtttgttccagatcacgtaaaaccaaaggaaactgaaaacacaaagcaaccttcaaagagctgccataaacccaaaggttagttcaaatcaaagggccaacttcagaatcaagggttaaagcaaactctgtaattgtccactggggccaaaatgtatcagatttcaaaagaaaacacaaaccatgctgagcccagttggttctgcagagcctctgactctcccagcaaggcttacctggctgtcggcatcggtttcccaagcttgcctggctgggtgtcagcagcagcctaaggtctctgacggctatctggcaccatgctggacttgcaggccagaaagaactaggcagacttggggcaggctaatatcagtgttgcaggcccaatttctggaagggaatttaatctctccctgaagccaccctcttcactctttttcagccatagttcataccgagaaggtgaacatgatgtccctcacagtgcttgggctacgaatgctgtttgcaaagactgttgccgtcaattttctcttgactgccaagttatttttcttgtaaggtaagaattagccgcttcttattcctatctctacccacaccatgctgcacatggggaaaggggatttagaaatggctaagaaaccaagaagcattggaaagggaaaatagagacatacttagaattaataaggtaggctatctcagctactcagcaaaacagcaccccatttcctgttatcctttcattttgagtcagactgaaacccattaggtagtataatgtactatttttctaatataccagagaataaccctcactttcactccagggagaaaactgaagataaataaggagaattcatcttctttactgctattttgttcatcgaccaagagaccatgggttatttgcaaggccataagtaaagctttgcctgaagactatccagaggaagcagaacctatctttgtcctgataaagggaatgccagctcacactccttaatcataggaccagcctgtctatgtgtggatcagcctgtctttgggatgaacctacacacagcattagtagtgaacagctcactattagctactcaggatgcatacacagttaggtttgagatgtcaattatttgcctgttacttgcattccgttctcaggtaatctcatacacgaaattgaaaccagggcctgggtttgcgtgtgaggcttctccccctcactccttctccaatactcacaaatgctcatcaaccccagcttctgttctaggaacaaccctagactcagagtacttgactgatctgacccagacagtaaacatacccagtcatctcaaaaagggggtccagctcacctgttattttactaacagtcccagggacacaggcagtgtggctgggtaaaaagagagctatactaagagtcagaagatctgggttttatcctgattttgacactaacttacatgttaccttagccaggtttcttcatctctctgggcctgggtttttgcatctgcaaaacaaatgagttaaaaaaaataataaccaaaggagaacaaaagagtctcatgacttgtgccaacactgatagctgaactagctgagctattgccatgtgtacatggaaagtgagccacaatagattagtgatgtctgcaatggtacagtatagcaagtaccggccaaccccagactacatgacccctacgattccttctagcactggcagtctattctataacaactttcttcactgcaggctgactggcatgaggaagctacactcctgaagaaaccaaaggcttacaaaaatgcatctccttggcttctgacttctttgtgattcaagttgacctgtcatagccttgttaaaatggctgctagccaaaccactttttcttcaaagacaacaaacccagctcatcctccagcttgatgggaagacaaaagtcctggggaaggggggtttatgtcctaactgctttgtatgctgttttataaagggatagaaggatataaaaagatataggactctttttttactcctacaagtgatacactttgaaaatgatgttttgttccttttgactttctttaccttttgaagtagaaagtgggaaccaacaggttcacagcttcattcctcatgaggcaaataggccttgggagaagaagagcgggtgcccttttatctaaacatggaaggctctgctcaactgagcactagatttgctacaaaccagcatcatcttcttcctcctgtcctcacggcttgtcccaccctctatgttcacttcaggagccacactagagattctgcatggcgtggaggaggacaaagtttcagcactttctgcctctcctaatactttacaaatgagattacatttgaatttgctaatactttatgagcaggcaatgaggtttccaaaatctcatctaaatactctccaatctattagcaaaaatcagagtaaaatacagaggaaaggcactgctttctgttaattgatttaacatgcatgaattagctccctctgagttccaggcactatgctgagagtacaaagaagacacaagtctgctttcaagcaactcactgtgaaagtgtttttgaagggaggaacagaaatgagacccctatctttccctataaaaacaacatttttactgtcttttgcctgccaatctgtatttgaaaccattggacactgattctctggcctgggactttggcattgatggttttctgcctttcttctcagcctctgcctctattgcatttattaaactgcattgtgtgcacctcgcctctggctttactctttgcagatcaccacagggggaaactcagctctgtgagctcactattagtcagccaaaagccaaattgaacttatgggtcacactgcactttcctgagccccaagcctacagaggccctgccttggagacccagcctcgggtttcctgctgcctctgctgatgccgctgttacagcaagagcaacagcagcacctgcagcgtggccagtgacctctgctactgccacccaggaaggccacagccttttccaggagcactgctcaggtgcagagccctagcaacccattattgtggttctctcagcacctatgtggagcatcaagtcgggggttatgaggttacaagtgaaagagtgactgtcgccaacaactccacttgccatccccgacagcaaactcccccatcatgtctactacaccttgtatgtgtaaggaatgctgatttccaaaacattcacgagttaccttgtgtaatattagggtgtttcctctgaagttgttaggaacaaaaagatcatattctcatttttcagataaaacaaaaatgccctctcctcaaaaaagtatgtatcatgtccagagtcattcagtgaggcagggatattgctgggagcagaaccaaggtctcaagattttcagcccaaagttcctgctataagaacatactgcatccccaaatgaggacaagatgtcaaagtgagtatcagctagaatgaacttcaggattgtcccatatttagcatataaatgagccaccctctagcccactatgccagaaacaaaaaaaatcctggcatatcacaggaccatgaatttcccacaccaaaaggagcctccagggaagatttaaggcaagagccaggagggattatggctgccttctgatctggggccatgatatgtgaactgtgagatggacatgtgtcacactcagtaggcattagaacagaagccccagaaagccaagccacatgcccaaggtctttggctccctcatcccctgttctttccattgttctatacagtggctactcttgtccactgtttctgaagagcacataaactgctgcccaaaccactcactgatagagccacctagggtacagctgcagaagagagccctggaagtgtaacgctgcatctctgggcctgtcattatccaggtatacgactttgagaatgtccaccatgtctctggactgcagtgtagtttctataaaataacatgtaaggcctcttctatttctaagattatatctaataactctaatagttctattaaggcagataattcaagagaagaggaaggagggactgattcccagggactgagggtgtgtatctatttcaacatcacatagtcagtttgccccagaggaaattttctctgccggagacaccactgagcttcaaactcagggacttggcagctggaattctggaagtcacaactttccaggagtgcctcagtgctctgcagtgaaaaaaaagaaaatgttctccaaataaaataagtaaaatggaggtgtcaaagaacatcaaggagaaggtggctggatataaaaagatgcgggaaaaaaaaagtaaattggtgaaaagtcttttaagtaaataactttgtgtctaacttaattttttttttttttttgagacagaatctcgctctgtcacccaggctggaatgcagtggcaccacctcggctcactgcaacctctgcctcctgggttcaagcgattcttgtgcctcagcctcccgagtagccgggactacgggcgcgagccaccacgcccggctaattcttgtatttttagtagagacgggtcttcgccatgttggccaagctggtcttgaactcctggcctcaagtgatctgcccgcctcagcctcccaaagtgttgcaattattggcatgagccaccacatctggccctaatttaattctgcaatgaaaacagatcaattcataataatggataaatggtggtggtgactaaaataaagacacggctgacggcctcgccttagatgggccctttacctgcacctgaacctgcatcctgaaacactcacagaaaatgcagcacaggcttgtcaagcccctttctgtatcgggacgaccagggcaccaggggcacgaagacagcgctctgtaaacatgcagttctcctttgcctaccaggagtcattcaggtggcaagggccccgtgagtcagaagtggggagatactctgcttctctgaagccagggtgctcccctggatctgaccaggccatttatttctcagaagacactttaggtcacttctaaaggccaggctggaacccaaaatggctaagagaaggatgccaagtcccagacatgacctgccctaagaggcagctctgctgagctgtgccccaggagtttgtgttatgacttcctgggcacctgcatcatagtgctaaaggcacagtagtaagtggcactgtcttcagtccttactggagagatcaccaagtgaaaggctttctgggtcagaatgtgtttcacagaaaaccgtccttgagtaaaatctgcaccttctgatctgctgttatccccataaaagacaaactgaaaggaataatctggccttatccggtaccagaataaatctggatttgaatatacagtgtcgtaagtgcagagcagtaccacctcactgccactcgccaccgtctggtccggggaactctgggttactttgtcacacagcgtgcccctgtctgggaaaaagacaatgaggaaatagtgaattctgcaccccccagacagtgagtacagcacatgcctagcccagaagaactcaatgagcagaggcaagagaaggacacagaaataaagccaaaggcagcaaataaccaaaaaccaagagtgcaagagaaaaagccttcaagagtcagagaaggagaaatggggttatagagcaagtggaatgtaaacaaatgaaactacttacagaaaaacaaaaagctaaagcccacagtaagaatcatcttttcttcatatcagggcagaggatatacaacaaaacagggttcctaagatctcagagactatctgacggttctaatgaaagaagacgggaggaaaacaagaggagactggcagcgctgacggtcatgtgactgattcagctgtgacttctagaggcaaatgcgctcagccaaggaaactgctattgctattatgattttggccccaatccatcttgaactaacacatatgacaatgaaaaatggattacttttaaaaaagaaaagaaaagaaaaacaaaggaagggagagagagaggaagtgagggaggaaagaaaactgcaagactaatgatggcgttcttggatatccaactgctacaaaagtagttcactctccatttctgtatcctctggtcacagactggtgtactagtccattaatcacatgtcgtactttgagtgacactgtctcatagcatctagcacggctccacacactttgttctattcaataaatggaataagtgaaagagtaccttggacaactcccttactcctctgtgtaaagaggaaggaaagggggttggaccagattctttctaaaatctgtcctagacctgaattccagaaatctttgatttcagatgcttgagggagtgtcctgatcctaagtgcttcttgcacttcaccagcttgactttccatctctcactgggcccactgcagcacacacttggctccagctggaaaatcctgaacagagcttcccggcaggtgaactgccataagtgggttataagcttgctgagatagtgttcagagtgcccatgtacctggggtggctggagcccctgagccagcccctcccagtcaggagcactacaaatacagttttccatgtaagccatcaatatgacaacagttgggaggcactgctgtgaaaaacagaacactgactaactcactccccaaaatgcaggagtgttcctaggagtatttctagaaggtccttcatttccctttttccctacatccacttcatcagtaagacctgtcagttctaccatgaaaatatatctccaatccatctacttcttccatctccactgcaaccaccttctataaacaccatcatctcttacagggactgcttcaataacccactaactggcccccttgcttctgctcttgtccctggacaatccattctccagttcttcataaaatgtacatcagatgatgacagctggacctccttcccaggcctgtaacatctgcaaacgatctggcccttgcttcctccccagcctcacctcacatctgctccttctctttcttcccttcagctgcagtggccttccttctcgtcctttctatgtctctcttttctagctacctgaaactctgtctccaatttttcacagttctcagctccaactaaattagtcacccatgccacccataaccaacctcaattacatctctgttcttattttccctcacatcactatctgaaatcatcagattcatacatgtttattttatgtctctcccatctcacctctcccctacacacacacacacacacacacacacacacacacacacacacacacacacacacgataatataaactatatgagggcagggagcttatcttttcactgatatgtctccagcccctgggcttgtgttgaccgcatcacagacaatcagtaaatatctgtgtaaaaaaaaggaatgcaatttcttcacttaaaaactcaccattcacctagatttaggaaataaaaatacaagacacccagttaaatgtgcatttcaaataaacaacaaaaatttcagtaatacgggtagctgggacatgccatatttggaacacatttatactaaaaaagtattcattgtttatctgaaattcaaattccactgggcatcctgtgttttatctggcaatgctaggcatgcagaataccaaaagtaagcaccaggcaggccagagtcccaccatgagcatcttcagggcccctggatgtggaagagggatgttgagggcccaggggctgccttgccggtgcattggctgcccaggcctgcactgccgcctgccggcaggggtccagtccacgagacccagctccctgctggcggaagtccatttcagagcttccggttctcccaagtccaaggattatgctcactccccacccacagtctcttagtgtctgtccctgctctaaagatgttgtctgggcttgatattaatatgagagctgactgttcccttcctgatctagaccataaccatcttcaagttaaattgctcctcctcttctaactgcccaacctcacccacgtctgaccatacccaagcacagagaagtgggtttaatggaccttcacacagaaggacacatcctctcctataatgctttacatggaaggttcagacataacctgagtcctgcttggggtagcatcatcatgactctcttgccctggtgtccttgcaatattccttgaaaggcatccctcccccaaggaagggcaggcactgagcacagcaatgcagtataatggctaagagtgggatcccggagccagcctgcttgggttcacatcagctccggcttttaccagttgtgtgaccttaagcatgccctaactctccaagtctcaattgctccatctgcaaaatggagatagtaatagcttttctcacaggactattggaaaatttagtgaggtcacacatgcaatacacccagcagataaatgatctatgaatgtcaggtattgctgttgcatatttaatttaaatgttgccatttttattaaatagacatatgaatagagttcctaagagtgttactctcatcaatgctgctcagggaaaagatgctgagtaaatctaaattttaaagttgcaaaatctagcaaaagattgttgatatgttgtatcaatcaatggttaaaaaaaaaagactgacatctttaatttgctttcagtgctgcaagcatgtcctagagctccgtgatcccctgagacctgtgatcctctgagacatgagccagctgtgctctccccaagtccctaagagcattaggagcatgagaagtgagcattccagccccttgttcttatgtcttccaaacattgtaacaggcttgttcatgagaggccacaatgcatgatcaagtgaccccaccactgaggaataggagaaagcctcaagattcagtggcccactaaggacgtattgccctaagtttctccaacccatcttcctattggcatctggagactatgcctcttcccaaggtgctgagggtgctgcagaccccacttgccctgcaggccccacccgcccaccagcgaagaagggctgcctttcattagcccaaaactgccactcaagaggggtcctcagacaaggtgggagccaagagatttggcgaacgtcacccttgtcccacagcttggatcttgatcactcatatcactcagaagagggacttttctctcttgtttcctttgaggtgggcggctttgtttttgacattgtagcgccctctgctgctactaattatcgcatctccataaataggtcatactggaggttgatagaaaatagatcagggaaggaaaacattctttgttcacaattcaagtcaaagctgctgcttctgtctccattcccttttcaactctgagactggcagctgcttctctgttggcccaaagggactatcctccaccagtcacccaaagaggactgtctttaaggatatgagatagcaccctaagaggataaatggacattttcttgtctacaaaaagcctaatgcaacagtagaggacatagggaaatttctttggatggatagagacaagtgcatctctttcttacgaaagaatagaaatgtgattaaaaaggaaaagcctagaaacatctgaacgtgtggaaatgggggtgagtgggctagagaaaggatttctgcatcactttcttcctgtagcaattccatccgagatccctgggacagacctggcctgatgaatagcaggaagcacaccagggagggacaaggtcctgcagacaaccttcaccaccaggctgggacagcgccatggggacccagggcctctgctttggggaaagaccttgctgagggccccatgggcaagaacaagtgtgaagaaccctactatggttttttgcccaatgccctccacaaagccagcgtttgaaggaaaactgtgaggaagaagggacactccatggtgttgttgttgccaccgctggagcagcctgtagcaagaacagtcttggtccaaccaggtcagtgatactttttatgatggggctgtgtgggacctgacctgactcttgctaaccagatttctaaagccatctgcagggtcttttctcctattattccccagggcagggagggcaaacagattatatctccattatcaagagctaacaattggtagagactatgcggagcatgctggtaagaaagattctgaggccacatctatactcagaggaagagagtgatgtgtttattagcaatatttaccaagggagcagaagcaggaggcaaccccacaccattttgtatttcccattcctgctctcgatgtcattccctgaaatgagtcctgcagagaaagaataatcagagccaattctccattggattgtccttttggtaaagggcaaatttttccatttctgtcttttccatggaccatttcccctgctatcaattgctgttgcctgcagcctaagaaataaaatttttaaataaatgagaacgttctataattctctctaaaatcataaacaatgtgtcaaggccaaacacttccctggtgtgatttattcctatgtggactcatccttgtataattagcaggaataatcacaccctgagccagctggcagagcccctggggacagagaccacccaaagaaggtccttgttctcctgagtcacataaagggagtcacacaaggcgggagtggaactcaggtgtccggagttctagtcccagctctgcttctacctatctacatgaccttgagcaaatttatcccgcagagcttcagcattttcatctctaaaatgagggcattggcccaggcagctgttaaatttccttccaagtctcacattctaggatgctaatgtgtaaaattatagaactgacccaagagttattagttcatatccccctgtgcatgttgcttgaactcctcattgcccagcaggaggaaaagggaaaacatgtttcttcattggggggtagcataatttcctggttgactatgtgtgactcatcagagcctggcggtccaagcccatatgccatttgaaatccggttattattacatctgggagagagaaaagtgctgaaaacagcctttgggacactatcgatttggccaaaaaaaaaagaagaagaagaagaaggctctgtctagtgtgataacattttgttatcttattcattgtcttcatccctgaaatacactctgctctctcctatctctgctctgaaaggcagaaagagggcagccctctccaaggcaaaatggggctcctgtggggaacagaggggtgcctctgtcaacaaaggtgatgccacatccctttcaaccatgctgacacctctggtttttgtaaaggtgcccactcctgtgggtaccgggttaataggaaactgacatttggagccaacactagaggaatcatgaaactcagcaagtaatatttggcagaatttttttttctatctgaaaattatcagtgagagattctaatgtgccttaacaaacaggaacaaaagatgagtgtttaatacaattcaatttaacaaatatttattaagagcctacagttattcccatggatcatctgagtcagtttccgaggaaacattatcgttgccttaagggagctggggggttgtcaacgggccagaggtgggatgaaaaatgacaacagatttacctctgggaccgggacatggttaaccacagcggccctgggtaagtagcttagcttcagaagaaaatgtgcccaacagcatgggtaacctaaaacaccgggcaatccaaatattcttttatgattggctttagcatgtattttattcttttgtagggcaggtttatctcaccaattatatattttcttaactgacctgtaaaatctacaggggaaaagtattttaagaattatatgtttctgcaattaggctcccagcagtcaacaaagaagtggtactttttgtctttccagtgatgaaaaagggaacctggcatccctggtggcccaccagcgtctccttccctggcctaggtcagaacaagccgtaaatcagcaggccgttatcttcttataaatctgtagagcagggtggacaacaaaaggcagcctgctaggttttcagaacatgagttccttgtgtagccagagaacctgggaccatcctgacgtggctggtcctgctgtcctcacagcctgaatcccaggctgtatgaataggagaggttcaagtccagatgactgttcacgatgctggtcccccttgcatccctaatcatgctagagacatgaccagggtctgagaggaggaagttacagcacagcaccaacaggggcttttggtaaagggcctgggcactatgtgaagatcacctagatgctcaactttgggaaggggactgagttaattgtgagcctgggtgagtacctcaactccagaggtagctttagcggaacccctctatacctaacacctggcaatcagagggctgaaacacttggccagataatgaattctcttatccggtgggaaaaggctgtaaagatcaaaccacctttcctatgggtaagcaagagtctgtagtttatgtaaaggcagcagctcctgtgggaaggaaggaaacaggaaatttacatttggaatggggacgcaagtgagagtgaagctatctttaaaccaaaggtgtcaggttatttggtttggtttttgaattatctggaagttccaaagaaagaacacttctccctgaggatttgattgcaaaattctgacttcaaacttctaaaaagatcaaatgttaaatcagatagtaggcttggaaaactctatttctctatgtaaaaagtagagaactacttttcttttgtttgatcattttattttgtttaggaaataagaggattagataccctggtggtgagtggggagggcagggacatttgcacagcatttctggataaattagatccaaataatcaaatcaaagactctcagctcagaaagtaattaaagatctcctcacccacctctttaattttgcaaatgaagacagtgaaactcagagaggttatgaacttgctcaaggtcacacaactgatcctgatatcaaggtccagggcaaagccaagacagctcatagttctcaccagcccagacccaagggagaaaaaaacatcatagtccttggccacggcagcatcatttgcatcccaaacattctttacccaagacttaatgaactcaaaaagaaatcctgagttccaaagggaaataaaatcattctgcgtctgttgaaaaaaaaagcaagctaaagtggaacaataattgaacttgatattaggggaaaggtgcagccatctgcagactgagagaagggtgaaaaaaacaaaatgaaaatgctagtcttgtgttcagacaatgattatgaccatagaacactacctataagttctgtagagctaatttctttcccagtggggttgatattctatgatagattgcatcagcggtgtgattgttttggaccatagaatacgtatacagaattggcttgttgagccttctggtgtcttgaagtgaaaatcatatctctggacatatctgtcaggcctgaagccctaggctactggaaagaaagataccatgacttatccttcctctaaagcttagaagttggagaaaaattctagttcttgggaagctctgcaaagcagggttcgttaagctgatgccacaggtttttgcaaagcccctcagcacagtgtttaagaaaccagtggctctaggttgacctttggggaaggaacacagctcacagtgaatcctggtaagtggaggggagcattgaatcctctgcctgaatgtatccattttatgccaatgaattgagatatggcttcttgccccatctctgccacattcaagtcctgcttggctaaacaatgctcacggatgtgcacgtgtgcagtgggatgcagctttttctaacctctcacaaaatcacgcaaccccttcaccaaactgcttggtggctcttctgtgccctcacagcccttctagtttagcagttagaggaagacaagtgcccaagggctttctcatttttaggtcattgtggaaagaggaacgttggtgatatgtttgcctgcttgggaggaaaataataatgatgatttactcattggtttctatatgctagttgatgtgctgcattctttctcttatcacatttaatccttataccaggtctgtgagttaggtgctattattatcctcattttatagaagagatatatttatattttatatttctatagaagcacagagatgttgaataacttgttcaagccgatgaagtaagaaagagaacctggagtttaattcttggcactcagattccagagctaaaagcttttcagtgaggggattatgtctagagggaatgtccctgatgctctagtctctaaggttgctaagataatcgctaaagaactgcgctctcagcaagtaaagccaggggttggtcaacaggaccacggtgacccagttacatattcttaatccttacaacatcatcaagcagttgctgttttccccactttacaagtgaggaaactgaggtgtagcaagttaggaaacttgtcctgagttttaaactcaagcctacctgccccaaagcctgagctcttttaaattaactgcaactgctgaccagttagattaactaattacttaattaataagataacaacctaacaggctgtaaggtaaaaaagtaatcagatttgttctataggtcccctcccttttcgggaatagctatacaattgtataattttatgcttcccctgggagagtgggtggagccctggctcccagcccatgatggaagggtcttggcagtatttgtaaagcagtctgtgggggtgtaactcagggcggatctgaaaagctggtctttggaaagggaacgaaactgacagtaaacccatgtaagtctgaataatgcttccaaatttctccctggaaccctgatttccaaattttccattctgttttataacccaggtccaaaccacagcagtcccattaatggattccagtgcaaaacaactgctggtgtattcctactacacgcaggtctctgttgtttgccctcatgtgctattttatctaatagctgagaatgacagtaccaatggagcactgagttaaggagtcagactgttcgaaggcttcattcttcgttataattggtgagattttccatgggactaagagaaaattgattaactctctgagcctctattttcctcctctgtagaatgggggaggcagttcctgttcccattttaccacagccggcgtgctgtgaggggatgttggtacatttccaataaggggacaatgagtgtgaagagaaaggaaggccccaggtggtccgtaaactcttccaccagtcccacactataaacagctggttttatcagggggattcttggatgacaagtaagcacttaagtaaatatcaaggggagtctgggcaactgagtttttgtagatcctcgtgtcattgtgttatactggagccaatagtaagctgacatttggaaaaggaataactctgagtgttagaccaggtatgttttaatgaatgttatttgtttccaaacataagccaccatccttagaaattcagtgaaagataaccgaatctcctgcccagttattagcatctttcaccatgggtctttctggagaaaatgacaatgtgggcagcccctgactgcagcccctttgggactgtttctttaacacctttaagtacttgggaatgttcagtgtgtttttgttaatgttggagatatgtgtctgacaaatggaatctgaattgaagttttagtgtgtaggggcagaaagcatttagaaaggacaaaagaaggacagattagactaaaatacataccaatggctgggagtatgcaatgcaacccaatccaaaaggaaacagtgagatgtagcctgctgattaaacaactgagccagcactccgtgtcagctgacttgtcttcccaaagcttccatgttggtgcaattaggaaaagaattgtctaatccccataactcaaaatcttggagccaagctaaattgggtaaagccgtgtaagattttctggtactgacactgactacaagctgatatttagggaaaagttaagattgaaagcaaatattcaaattagtcagaaagaccacgaacttctgaaaacaagccccagggtgctgttaactgctgcatttctaattgggtcctcatggaacattttcatctctgccttgtctgagctttctgcaccagagaagccccttttgatacccactcacttctgagtccctcattgaaaaggtggcaactaagcttagagaaggattccctaatccaaatgcaatacttgggggaatattttgagtattgctccaccattctcaaaacaaacctaatttcagttaacttgaatgtagctgaaattttgttccatgagggaatctctgctttctatgataatgcaagctcatttcaaacaattgtttgggatttaacttttgctcataattcccaaaagataccaactattcaatgagtatcttaaaataaaactacttttatgaccaaattattatccccattagaatggctagaatcagaatgtcctagtatgtattatgtgaaccccatgcgaccttcctaaagtttcttatgcctaaaacagcataagagagaaaagcatttccacgctaacctgtgtgttcactggttaacaaaggtctaaagagcaggtgagtcagctgctccatttccaaactggactggacatttacagtcctgcagatactaaaaatgataatcaggaaaagcacacacaattctactttttcttataattcccatctttcccaaagaactgttataaattctctcccaaaggtgttatattcatccttcttttgttgcctctatttgtgatgtgtactgaggtgaaatatttgttgagattcaaaaaccccatgagatttaacttaagctttccctgtcagagagattctaagagctaaaagatgggaagctggtatttgggaactagattaaaaagaaaatccaaattaatcccaaggagcaaggctcaatagatagttatttagacataacatgtccaccctgcaagcctagttgctcagttgactgggctgcccctatcttagtcttgcctggaagagaaataagttgtttgccccatacctgtcttgagaaatgtcagcctccagacctgaaagcttcttgtgatttggtttatttctgtagagtttattattatacacagtgttcttgaagtaatagagaagtgcattagaagctcctgcaaatggaaatgaaatgtaaatttagattgtaaatacatgactgcggtaaatagatagcaagaaaaaggatgaagagattagaaatttgccacatttctctaaccctaaagggatgtttctataaatagtttaaaactgttgaagacgaagggggaggaggaaggagaacagaggcaaacagattttctcctaatcctttccatttggcaaaattagaaatggtttttcaattaaatttccctgagcagaggaagaaaccatgtctgtttccacactaaaattcctgtgggtgggagtctctagagttgatttggaggatggatccctgttagtgacaagtgctggtaatgctcctgttggggaaaggggatgagtacaaaaataaatccaagtaagtgtggagggacaagaagatctcacagtgcaggatttcccctggattttctgcattgccttttcacctttcctgtcttagcacgacaaattaggtcccagatgagcaggccctcgcattcaaaccggaaattttaaggaggaagccagattaactttactcgggagacctagtagactctgactttaaagattcttttaatccagctgtttttagggagagctctgtaaaagatgaaagaaatgttttaaaaaaaaattaaaattctgtggggtgaaaacaaagatgttaaatatttgattggcaaggcaactggaaaatctggaccatgtctacaactgctaaaggaggctttgtgaaagagaaaatgagcagcccaaggagatcctgtcctaaacttctctggccagtgaaattcgggccattctctgccacagccctggactgctaggagggcagatcatatgtcttcctcagtggggagaggtgggccctcgctggcagtttctgtaaagcctcgtgctgtggtgtaattcagggagcccagaagctggtatttggccaaggaaccaggctgactatcaacccaagtaagtatgacagggtgaagctacatgcagctgagtacagtcttttcctttctagaccgtgtcctgcaagctctccttgagggacgtatactcattttgcattgtcctttgtagagaagcagaccaggaaagacaggaaagccctcaaatttccacttttaaacacctccctgtaaaaactgtctcgcttccctccccttctacaatcagtttctagtaaatcagaatccggtgaattgatatgcaatttcaacgaaaaaaaaagcagagaaatagttaccccaacaagtgcaaaaagtagaaactatctgagtaccagccaagggaagataattaggaaagaaaaaaaaagaaagaaatggattactggaaccatgatggcagcttagtcacaaagaaaatgataaaaaaaaattaaaattaaatttcaaaaactttaaagatatatacatatatatatatctatatatatatgatatattgtcctctggaactccagcactcacctacagcagctgcattctggacttattatcaaataacctataaacctgtagcttaatgaagagttgagcaatcgtgactatattgacccccaggacccttctgcaaagagcagcttctgttcctgtttctgtaaagccttctgtggctgtgagaatagtggaggtagcaactataaactgacatttggaaaaggaactctcttaaccgtgaatccaagtaagtttgaagggagtgggggaagggggaattcaaacacttctgatttaattacttgcccctccaaaacattccagcttaggttccaaatctaatgtttgtgctggggggatatggtgcccatcagagggattagaactccactgtacaaagactaaattactttcagcccaaaacattcctatcattcatcttaaacaagattattggtgcaaggagaaaaactgaatacagaatcctgagggatccagctaagggtcaggaaatgtttgccgaaaagataaagaggaaattggcatatcgtgactacgcaaatgcagtagaccaaatataaattgtcctgacttagatactaacactcctcttaaatttatcgcctgaaataatggaaccctgcaacttcattaactaatgctgaaaattctataagcaggctccttttcttcttttaccttcactttacctctctgaaaagaactgttctcaatccccagtctggtaactgaggtccagtcagttaactgtctggttaactcaggcagagcatttaaccccactttttctttggttaccaaaatagtggattcagcctccactttacttagttcacctgagaaggggaaaattcatctgtcctctgagtcgtgagaatagagcagtacattctctccttcaaatatacacccacccttccctaatggtaatgtgtgagtacttagaaaagtttttaaatgttagatataaaagtaaggcacagtggttgctaatggcacttcttgaaaatctgcgctgctggtggacttctgaaagtggtgcttataaactaaggctggagaagactgacttgtaaaattcagataaaatgaaaatgggaaaaacttatcaaagggccccggtctcctaagtgccctgatgttgagtaaaggccaaatgccccagttttacttactcagatctgctttctgtgattaagaagagatgcacactagagagaggcactttgaaaaacacagcccaggcaaaattcttaaaaagactggctctggtggcggggcgggtggtgaaggactcagggacaccgtgcatgcagcattgagggagttaatgcagacttgctagcagacagcttggaacgttctgggataggccctgcctgaagaacatgcagtgtggttagccatcaagttcccatgtgcagaagtgccttgctcagcaggggcaaaatcagcacgtctgtggcaacagcaacaatgaataatatatgatgttaaatcccaggggttcagcagtctccactgaggtcttatcaaattaaagcttcaaggggattcatatgaacatcccaggagactcaaggactcagtcgcttttcagagggtgggcagccaatgctagggaccagacagtaggcttttttctttggtttcttaccggaagcacactagggcggggctctgcggtgggttttccagaatgcagagaagctgggagcccctctcagcacttggtcagcctcttaggggactgagaactgtaacaactcctaccttttaaaacattgacgaggtcagggtgtttgacagcctaaccaggcaaagaaaatatctgtgcaaggctagcattcttccagagctctggacagtaatcgtatgccagattttccatgcagtggattctagctgcaggaactatatggcaaggctggagtccaaggaacccatgattaaattctgttttcctgcagtaagtggaacacagagattattgccacagcaacactttgggtgcctgtctgtttgaggacctcagctgagggcaggcatctggttttgcttatgtcctgcggaggctgaagagagggtgggaagccctttagacagtgaatactgtgaaatagtgaagagatgggaagggtcgtttgaatccctgactgctgtccttaaaaaaaatggatacgtcttcttagctaaataatagcctttttctctcacccttttcatgatagtaagcaagctaaaactttaaccctttgtaacaagtggttgcttgaagacatgactaaacaggctagcataaattcagcccaaaaaaagtctgagttaagaaaactaaattctattaaagaggtgtctgtttttcacacccctgggggacagggtttgatcatcaccacatcatgaaactgcctggattttgctcttcacattttttgtgacatccagacacagccagggtgactcccaggattcctgtggttgtgtctgttggcaacagaagcattatttggtcaagggatgaaatttacaggaaccccaagtaaatgtgcaaaagcctgcccctaatagagacctcacttaaccctaccactgtggtcaccgggctgctctgtgaggtcagaacacctcaggtgagactgtggagtaaccagatgtcctggttttcctgggtttcaggggttttccaggacaaaggtcattctttgctaagcccagaatgatccccaggatagttaatcaccgtaagaaggcacagataaaaacttttttctgtgagctactacttacatttcaccaaattcaagactgacaaaaaaactacgttgtgtgaaagctcagttacatgtgcccatcatttttatttcttatgctagggcatgaagggaagctcaggagatcctgtttcatgaggctacagtctaaatctcatctaattctagtcattctccaaaaagctgaacactctcctcttgtctccttgtaatcaattcattgtcatcagaaatgtgtgacacctcgaggggaggggaggacgtgtcttgaaaactgatcagagaaattgtcctgaaaatgatgctgtaaaatggaaatgagacctttagaaagagagatgctgaacatgagaaatcagtaagcctcaagacaaaaaccagaggaaatggagagagatgggaggcaggaagccggacctcgggggacgcagcaggtcagtgtcccaggaccagaggtggaaatggtcttccagcctttggtgggatgaaactgagcctcacagacccaggcccctttgggtgagtttattctccccagaattaaaagaggaggaagtctgcgagcttcagaagtccccctagggttcttgtaaaggcctccagtgcagtgctaatgctggtggtactagctatggaaagctgacatttggacaagggaccatcttgactgtccatccaagtaagtgtaacaagacacagcagtatactggaaattctggaatgtcaccccagtgtcaggttttaaagaaccagatattgcttaaagttaagtggtgtcctctgaggtcctttctcttctttaacctcaatattcacagattttcttttggaccctgagttgttaggtctgtctccctgctgcgtgtacagctgaccttgaccctggaaagtcagaatctttcctgctttcagtgtcttctctggaggtgatgccctaacttttttgagggggaggtcatcctttccaaatgactcccctgagtaacctgttctaatgtttagtagcattccctgtcagaagtccttccttacctcaatcttaaattattcttggtatagccgaggccgtttccaccagcatcatccacaataaagaggaaaattgagagcggagtttgaataggtatgtggtatttggttcagaatgggttttaaatgaaagtggagagggaaaaaatgaaacctgaatgggaatctgaggtcttatttcaaatccctctctgtttcctgtctgtcatctccttttgcttctatagatgcaaaactacagagagagaggcggggagagaaaggatagacagaaataaacatccactgtgtccattccctgtcactgaaaccaccaggcaagggattacaattaattccaaagagtttcagatacacggcttaatacctttctccttgtggtgacttgtatcctggctgataattagagcagatagaaagatttggctttggtgtgtttgccgctgcaccccgctgggaagagacagaaacttgactgttttttaagattcataaagttccttctgtcagtcgttgtaaaactccctgaagcagggagatgcgtgacagctatgagaagctgatatttggaaaggagacatgactaactgtgaagccaagcaagctggaaagacctaaactcacagtgttccttatgtacttttgctcccttccccgtttcaggccttttggctgtttcctgtagggattctaagagagtcaaatggaaatggattgaagagagtctgaagccccgtgggtgctcagaaatgataaatgaaaggaataagagacagaaagggaaacaaagttgaaaagcaggaatatgtctttcactgcagcttgataagactgagatgtgaggtgggtgtcagagaagggcatgatcgctccagctgctattgcagaacactctgttttcctaggatctctatcaagggcagtgtcctcttatgccaaagggatgagtcaagtccctatatttctggagtagctgcccttgtgcaggcatagttggtcaggcagacagcacaatcccagctcagtgtgtatggaggaggccacctgacattgccagctgtatctgctccattcagtggcagcataaatccataccaggtgggtgtggatttggaatatgccagtgccactacaaggctgaatgttgagttgttgtgatcatcttgaatgtgtgagatgcctccaagtgaagtctggttctaatgagcagggtgcaggttggaccaatattgcccattttctgttgagtttctccaagcccagtagtgtgggagccaacattgagagactgacatttgagctagggatcctattgactgaaatatgccaaagggatctgaaaggtcaaaactgccttcagagctcagcctttgttgttatctctctggcagttgtcatttcagcaaaatgcatccacttagaaagctcagctcttcattaggcagacaaatgagaacaacatattgaccagagataaggagttgggagcccagatctcagcctctgagagcctggcatttccagttctttaatcacgtgagccagtgagcatatgctatctcagagaaagcagatcaatggtgcctgaggacctggtgtcaccaagctagggcttagagacagaaatgagatgcagatggggatgttgtgtgaattggggaataatagagaagtgaggaggagacagggagttcaatgatgctttttaaaaccagcagcatgtgagaaattgtaatgacacaaaggtgaagaagtatgtattgcatataatcctagcaagtttcctaccattcccaacagaatctagcctcactgtggctccaactcacagatcctataggtaatgctgaatcttacctgagatgccttttgaagtggcatcaagactgggctctaaaatctttaagagtcacctgtcagttattgtaaaggtttggatggctgtgtgaaaacctcctacgacaaggtgatatttgggccagggacaagcttatcagtcattccaagtaagtgtccctggggtgctgcctgtggagtgcgctggggctaacagtctcatacattagggcttaaatgactgtgcagatggcatcgtggttgaggacacaaaactgagagaatcgagatacattgactctgatcagaaaaaaaggtcacggaatagcaaacataggtttagtccttaaaaggtagcatagataacatgggacttgaacgtggcaatttgaaaaacaacctgtggtctatcagcacgttctcactgcacacgggggataaacaggggtgggggaataagcaatggacattgcatgataggggtgctagggaaatgaggcaggtcaggaagaaggaaggtgatcagagcctcatacggagttaatctagagaagatgaattgttccataagtttcacaaagaaataaagtccaaagatataataagaagtcctgattaaaatccacttcagaatcatatgatcatcaggagagaaattaagtcttaaaagaaaaagaagtttttaaatgtaggtccataaaacaaatggacctacacctttaattagacagcaagcagcacaagatgcacgttagccttccttttaatcccctctcaggaggaatcagtccctccagctgcacatggtcacagctgctctaagccctggagctccttcccagtaatacccttgctcctgtgcctgcacagggaaaggagatgcctgcctgcctgcctgcctgcctgcctaccggtctgccttttggtccgccgcttggtggggccccaggtgtaacctctggctgtctcttctgcctggtttttgttgagcttcctatcacagtggaacaccggtaaccagttctattttgggacagggacaagtttgacggtcattccaagtaagtcaaagaaaattttccatcaccattgtgttgagcaaaccctttaaactgcagaaagagctgtcaaagtctgctactctatttctctgcttctaggtataactttatctggaccagagtaaagaggcccccgacccaccccgagaatgatttatgcttggacaggtctttatttcattccttgaactatctatctgtctatctatctatccagctatctatgtatctatctatctatcatctatctcagaaatagttgtttttaacagttgattctgtgcctcacccaaattgtcattaactaaatgcagatgtgctgccacactgataaacttcattggaaaaaaagaaaaaaccaaacccagagaatgttccttgaacattcctgaagtgggggggcaggcgatgtcacttgcagtgacagctggcctctctagctcacccccacatctgtgccaaccagagaagctgggccctttgtagcacaagcctcaggagcagagaatggagggacattctcaactgagaggagagggactaggaggctagatgggaaatgaggtgactctacagaaaatcgaatatgggatggtataaaaggatgagaaagatggcagggggtccacgatcgctcttgtatttagacctgggggatgcactgatagataccacctggagagagaaagaggatttctgtttccctctgaagaaaaatgtggcagaaaaatcaaaacagatcgcacatgtcaagcctctcctaattacagcctttcattctggtttctctcagctgttccagcaggaaatggtaggaaagggtcattggtgcctttgatgttgtggaagcattgcaggaaggagatttgcaagaaacggggcaggggcttgcagtagagtctggagagtttagaatgatggtttttgcaatgacttagaacactgtgtatctaactttggaaatgagaaattaacctttgggactggaacaagactcaccatcatacccagtaagttcttcatccttggtcaggaaatcagcctgcataagattctggggatcatagtagagatgcaggcttagagaattttcatctgtccttgttcataactggtagagacaggtggcagccaaatatctgagttttccgggggaactccagtcctgactatttaattcaaaactagaaaatatgattcacaattctgtttttgctgctgccgtcaagtgctaatgtggcatgtgaagagaattcaggcagaatgactgcatcttcactttcatcttgtgtgataattttagctttgagtactgcaagtgtttgggagaaatggtagaaacatagaatatcaaagagacaagcaaaccaagagacccagagaggcaggcagacggaacgtcaggcagtataattttacaaaactaattcagtgttgtgtctctctctgcaaatggcaaggtatcgggaaaggtgctaagagctagtgctccgggtggggcaggattatctaaatagaaaactaagcactgatctcagggggaaagtttaaacttggaaatctctgggtttggttttttgtttttttccaatgaagtttatcagtgtggcagcacatctgcatttaattaatgacaatttgggtgaggcacagaattaactgttaaaaacaactatttctatgcagccataaaaaatgatgagttcatgtcctttgtagggacatggatgaaactagaaatcatcattctcagtaaactatcgcaagaacaaaaaaccaaacaccgcatattctcactcataggtgggaattgaacaatgagatcacatggacacaggaaggggaacatcacactctggggactgttgcggggtggggggagtggggagggatagcattgggagatatacctaatgctaaatgacgagttagtgggtgcagcacaccagcatggcacatgtatacatatgtaactaacctgcacaatgtgcataagtaccctaaaacttaaagtataataataaaaaaaaacaactatttctgagatagataaatgatagagagagggagatactggatatatatacacagttaatgacaatttgggtgaggcacggaattaactgttaaaaacaactatttctgagatagagagaaagagagagatactggatatatatacacagggtagaagaatgtagagagaaacatgggcaaatatattcttttgcacctacaattaaaagctgtggaaaatttgaatatgttcactttgtaaccaaagacaaccacacaaaatggaacggaaagcatgcttgcaacagcgagaactggaagtatggaacctttctgtcttaaccactcagttgcctagaagaatcttttttctattttgctgcattagaaattaaaggcatgagtattgaggatttgggtaggtcagacttttatagtgacaatcacattacaaagcacctcttagctaggttggataaagcacctttaaacatcaaagtctttttcttctttctggatgagatagaaaaatggtctctcctcactctgtatctaaggacagggggctcagagagttccagacttacaaagtgagactgcagcagagctgagccatgggacctggagggacccagtgacggttagtctgctccctcccacgggtgctatagtagccacaaccgttcaggaaaccgtccccaggtgagaacgtaacacacgcagggaaaatcccactgctactaagagcaactcagcataagaatgcattacccagcaagggacagtcagaggggctctaaaccagagccccaaatatttgaaaactttatgtggaagccagctataacaagttcgttttccaagccgtgcttccagaagctgttagtggttggtagttgctaagggttttgaaactggaggacatcatagcagagtggaattatttggcacaaggggctatgattagaattaatgagatgaaagaaaattctggctagaagactagaaaaatccggaaagaaaagatacagtaaaccttgggggagttgtagcatttatcctagtccaagcagcaaagagcagacagaagccaaattccaataaacaattggcctttttacttttacaagtttctgcaattatcacaatgtcttcagcttcttgggcaaatatcaacaggtcctaaatgcaaagtggaacagtcctctgtttccagaaccgagtagcttagccccgccccacacaccacccatgctcaaccactgtttttgtagaggagtttgacgctgtgtggaatatggaaacaaactggtctttggcgcaggaaccattctgagagtcaagtcctgtgagtataaaacacactcaagtcccaacctgggtttcattgcatattaaataaactttttctggctgggaagtatttgattctaaagaaaggaaaagtgaaattccaagcgcaacgcaagcatttcattagtgtgattcattaagaatttccatgggttgccttcgagagcgttaatcacatccattcactggtgagacccacagtttgaaaattgagttaaatttgaaaaaaaaattgtcaccatctctgtagaccacagtgcttgctgtttgggtgtctagacttccaaaatggaacctcaatctgtagtttcgagcttggagatttatcccgagcccgtgacttagagatgtgtaagaaaagctgcacactgctgggccttgtagggcatttgtgggatcagtgtcatgaaatagcctgggtagacaggttggtgaggagacactggtgacaggtgtctgccctgtttctgtaaagctgctgacagccgtgagaagaaaagcagcggagacaagctgacttttgggaccgggactcgtttagcagttaggcccagtaagtctgagcagaaagtaagatatttatgccttttcctattatttgttctagcctgacatttgagttgtcctcctttggattccagatcaacaaaccatagtgtcttttcatactccttttaatatttgtggctaagggccctccgttcttcccatctgtcctacatgagggtcctgtggccaggtccacattcataaagaagccaacagtgatgcagttggttggcagtgtgtcaagaaactgcagtcatcatctccagggcccttactctggttatgtgtgtttcaagcttttatgccagcaacagaggagagggagaagtgaccagtagcaatgaccagggctattagctgtacctggtgtctgtgggtttcagagcagctgtggaggttacgggaggttcagggcatgagtttttctggcagaggagtttatgtaaagggttggcccagagtgtgtattcaggaggaggtgctgacggactcacctttggcaaagggactcatctaatcatccagccctgtaagtgcttttgcctgggaggtggggttcaaaatgcagtcctcatggggacatttctaaaccttggctcatgtgcttctggtgccactaccatttttggcactatcctacttacatgggaggttttgagccatgtagacaaggaggtgatgcagtttgtgctttggaggactcctgagatctgccctttggcaactgtgtttgagtaggagtccctcattggaaaatctggatgccagcagacaaaagatatgagcttaggatgggtcacaaacaaatggaggccactttgccagcagcacctttgcaacgaaaattgctttcataggaaatgtggaaatggctgtgtagatagagatttggccatttctccttttctgtctttataccctcttctctgcctgacttagggaccttaaattagagcagttattaatcatttgatttctcggccccatcactcatcaagtatgacaagagggattcattaagataaaacccagaaacagaaaggacaaagaattcaattctcaatgtcttcagagttgaacttgacaactcctcagccttaaccatctagtcagcaccccatgaccaactgaggtcaaagagggcaaccagcaggtaatgttagtcaagtgagtatctggccagagcccagctgccctcataggaattaatactgtggagtttgggaaagggaaatgcatctgtgagggctcacccaggctgcccatctgggagagatcatggggagagttctgagtgagggagtgaacaccagatggaaagtcaagcaacaggtttctgttatgaagcatctcacagtgtaaataccggcactgccagtaaactcacctttgggactggaacaagacttcaggtcacgctcggtaggtaacagaaaccgtgaggtaacttaactgtgtgttcctttaaaacaggggatactgcagaggggatatcctggctggatgtagtccttccttccttccagtgggaggtgatctcactgaggacacatacctgcattcagtcagttcttgtgctatttttatacctgttacggaggctttcctttccacctgtgaaaacagaacctctctgctccaagcttcttcagtctttattaccctatgtatttcctttagaacagtggtttgggaattaatttatcatcaggactttgtctctgatgatatcactctgggcaacaaaatgaaagggctctcaaatagagaacagagagtcctgaatactcggataacttttccagagtgatatgtgttatgcgtaatgggatgaagtgggctagaatgaccttccaatgactattttggagacacactaaggaaacttgcttaacatcctatatccttaacttgttagaacattggtgaagtaaagcaaaatcttgaccctctaagaacataaacaaatgccaactcctctcccccaaagcactgccatgtttcattatgtgcaattatgaaacaaatacatgataatttatatgaaattacatagatgagtagtttgagtattttgacccatgagtaagatgcaaattgtagaagttctcaggtagttcttcataaaaagttgtccctgaagacaaatagtgtacctgggcataatttgtttgcagtgttggtttatgcaccatttggggacctgtttgaaagctgattatgtcccagtgtgccaatttggggtctcaattaactgtgctcagtgcactgataagtgcccatatttacagtctagaagcatgacaaaatgaccccatttctgtaggaaaaggagaatggaactgtgtgtggcgtggtacttgtcagtgctgctcccccttgtccctgccatgctgggaggtggctgcaagttttccccaggaggtttttgttagagcatgtattactgtgacaataacaatgacatgcgctttggagcagggaccagactgacagtaaaaccaagtaagttgggggaatgggtcaatcttaaaagctgacctgagtgagcaatggtgctgttctgggcagtttctgtggggttaagacactgccactcccaagaggatctaagtacctggtttctttgtgcctgagaccctgagctggttggaagtctgttagttgatgaattctggcaatcttaaggattaggtcaagaagaagtagaaaatttcactggtttcttcattggcttggctctggatatataaaaatgctaaatataagccgggtgcggtagctcactcctgtaatcccagcactttgggaggccgaggcgggaagatcatgaggtcaagagatgcagaccatcctggccaacatggtgaaaccccatctctactaaaaatacaaaaaattagctgggcatggtggcatgcgccggtagtcccagctactcaggaggctgaggcaggagaatcgcttgaacccggaaggcggaggttgccgtgggccgagatcgtgccactgcactccagcctggcgacagagcgagactacatctcaaaaaaagaaagaaaaagaaatatggctgagaaagtggcatggtgctcctggtccctaaagtagcccctgggacctcaatgttgacctcctgtgctgggtgggatgtttctgcccaaccttgctattgtgcctctggcacaagcattctgtcagaacccagtgtcctaggaacaaaacaggggatttacgatcaagttcagatctatctgcacagccagctgttaattttagagaactgtcctgaccttgcaaaggaactggaaacagaggctgcaaggtggggagacttccactagaggggaaggtgatctcacttgctcagccttcccctccatccttcccacctgttgattattgtaaagccccataggactgtgtgaattatggaggaagccaaggaaatctcatctttggaaaaggcactaaactctctgttaaaccaagtaagtgttggggattcaaagtcctgatttatcatcagtactttgtcactctgggcaacagaatgaaagggctctcaaatagagaacagagagtcctgaatactcagataacttttccagagtgatatgtgttatgtgtaatgggatgaagtgggctagaatgaccttccaatgactgttttggagacacactaaggaaacttgcttaacatcctatacccttaacttgttagaacattggtgaagtgaaaacaaaagcagtaagtgcaactaaagtgcaatgcagagtgagtgagaagagacttaccaactcctttctctgtgatatcttccccccaccttcacccttgaaccccacagaattgtttctgtccatgcccctggctgttcccagtccagaccagcacgtcgttctgctggacataggaaaactccagacttcataacatgtcacagggccccctccctcagatggcagatctcaatattgatcacccacatcactgtggggagtggtgaccttgtcagcaatggtctcatggaagagggaagctttatttacaccatcaagggcccatggatgacccacagtctgtgtgactgctgtgtgattggttttcagacattagctttaataggaatcataggagaagggacatggtggctactgcaaggggttttttgtttagggagaacgcactgtggaactcaaattccgggtatgcactcaacttcggcaaaggcacctcgctgttggtcacaccccgtgagtttttgtggtttactaattgtcctctctggaaagaaatccaatgggacctgttgaaacacagctgaatttaattgctatgcttagcatgcagttgttaactatgtctgatgtgtgagcaagatatgaatacatgtttccctggaggctggatttggttatcaggtctcggggcagtttgataaattgtactaatgctgcaatcactgtttttcaaaggtccacaaagcacgttgtggctttgggaaaggcagagataagaagcaaagctttgtgatagagacagaaacaaggccatgaaaagggaagctaccaaagcaatggcatagccaaggaagtgtgtcctcaacagataagtggcaaggaccctgttgagttgatgcttgtgttgtctggtagaattaaaaaataagatgagtgggctgggcacagtggctcatgcctgtaattctatcactttgggaggctgaggcaggtggatagcttgaggtcaagagttcaagaccagcctgatcaacataatgaaaccccatctctactaaaaatacaaaaattagccgggcgtggtggcgggcacctgtaattccagctacttgggaagctaaggcaagagaatctcttgaacccgggaggcagagattgcagtgagcctagatcgtggcactgcattccagcctgggtgatagagcgagactccgtctcaaaaacaaaaagaaagaaaaacagaaaaataaggcgagtggactgaggactccagtgaagggagggcagcaggagttccaagcttggcatggctttcttcctctacgagaatagcagaacaatgtaactttctctagagagagaacagagcccttgatttatcacatcaatgcttctgtttaggtagcccccttcctcaccgtagggacaaagcaggcccccacatggacttcacccccttaactaggctggccaagccaaccctatgggagaggcagagaatcccaggactgcagagggcctccccatgtccactagattatctgtaataaaacagaatatttatccaagttgtgaagctgtgagggagagggtaatcgtgatagattataaaaagcaatattgaaaattatacaagctgtctccacacttgcagaattcagtgtgttttttgttgttattgggtttttttctgttagaattacagaaacaggggtgctttcctgcaggcaccctgtttgcaaaaatgtctgccatctcacatttcagtagtatttcatcaacaatcttctgcacacgaaccagctgtgacaataaggtaatggggctgatttgttaacaaatcgagtttatacatttcaatgagtggcctagtcaaaacactcagcttgaagcatccaacactgtccattgctttccccctccctgaaaccaccctcaaaggccaaaacactttctttttgtagcatccatgatggctttatcttttaaaggtggattttactcttgataatcaaaatcctttcagaaccaaggctattaaatagaggagagaatcgactagttactgatactgttttggatccaaaaatagatgtaactataaaataatgtcatgggtttgtttatgtggctcataaactggctctcggggggaatcctagatggaatatttcagagggttcaacagtcatttagatgcttaagtcctcatatgttcactaaatcagactctttaattaataaacatgcataaagatagcatgagattgaagaacttttgcaaactcggacccaatagaagcagtgaagactttctgtatgaattaagatataatccgaaataaattacttgtagaaaaatacgaggtcaaggcctttcaatggggaaagtgcatgtaatgccccttttattcatggagagtaaagctgcttccataaatggtaacattatgttggtttatgtagagacacataacactgtgactacctcaggaacctacaaatacatctttggaacaggcaccaggctgaaggttttagcaagtgagtattacagacaagacaggctgtattttaaaggttgttggtgttcatgtttgagggacaagggaaggtaggacaagggaaatacccatgtaaactgtgcaagctaaaatcactgctatctgaagcggcaattctgggtccctctactctggacaggaggggcgaaggagagctctgaggcttaccatgatggacttactgccgatttcataagaattgtatccatcattagcaaaatgtttatgacttgaaggcctcaagaaactcctgttaacacaacaggagttctgtgttctttattcttttaaaactatattctcactttacatttttcactcatttttctgcctttttttatgcgtctctcctctgtgcaactcaatgcttcatctgggcattcatattttgagaaatcatctcaagaggaaatcatgtccagatcctagcatgtcactcaaagctctctgaaatctgggccctttctattctccaaatttattcccactgattccctttcatgaatgctctgctccaggaaaactaggtatctccctcccttgaatatttacacatgcccacacctgtaccctgtgtccatacatcagacatcctggacccaccacctaaaacaggcttgcacaggtgacaaaatttggcctcatcatctctcagccttgagacccagcacaggcatcaccagatttagtttcataggaagagcatgaaaaatcatatcattttttaattaagcaggccaaggtaagagatccatcagacaaagaagcaaagtaggaaggagagagatggcttctgtaatgggtttgcaaaggagagctctgtccctgaaatagcactaatataatccaagtaggagatttacaggctgcatgtttcttggtttccctttggagtgctccattcctaacaccagttgttaagcccctggtcctgaatgtggccgggggtgaggaagtgggaggagaccatgctggccactcagtggtggtgcccatggagtttcgggctcagactttctgtgagatacctcaaaattgagagaagctcaaaaggatcatgcagcaaaaatgggagaagtcaccttcttagtcataagaggattatttctgattagtccttgagctgtgttatgtcctggggaagggacagtaagagtagaaaagtctctcctaggacaaggataggaagtggtgaaaagtccttttcctggtgactagcaaagcaggggatgaaaagatctggagttggagtccagggtggattccagggcagacaactgcataggactgtctcgagttctgtggattgaaaaggttgggcatcccttcagatgttcctgagctgacctcagtcagaggtgcgtggctccagcacccagaaggtgtgaccagcacaccaacccctcctcccaggtgggccgtgacagcttccctcaatccctcccactctgacaacagtctctctgattgcttttgctttggtgctctggacataaactgttcctactttgtccaagtgaggtatataattttcagaacgctggagaattattatctaaaacaccagtggatacgctacaattttggcattcagtattctgggcttgtgcaggaaaactctttctttagaacatgtagaaagactatcctttagttatccagtgtggaaacagtcctgaaatccaaactgatactgcgatcctgtgccaggttattactgtgacaattacttaatattctctgtgctcacgatatcactccttccagaagatctttagggaaaacttagttcagtttctaggaggtttttgctcagccgaagatcactgtgtgaataataatgcaggcaacatgctcacctttggagggggaacaaggttaatggtcaaaccccgtgagtatctctgctgaatccataatgaatgctctaatttcaaaaggaagccgtagcactgagctctgttttctgttttctctacttaattttatcttttatattaattctaatggttacatgttatcgatacatggcatatgtatatatgaaaatggacatacatgtaactgtctggcgtgggaacaaatgtgctggagaaaaacagatttcttgtcctttttgtcttaaccatttgggtcagaaggtctgactgagtagaacatgggctgggtgagcactgcagtgggggaatccttctccagcagctttgtcagaattatgctctttgctggcctggtcagaaggcagctttgtcaggaggtggaaggatgaactagttaacctcagaagagcctttccactccgaccatgctgggaatagaccgccataataaacagtcttttccgctgcctctttagccaacgtcccagctggaggagcacgccggccagatttggggattgaaagggatttcctgatacacattggcctggtcggttttggtaaagctttctatgactgtgtaatgctggcaacaaccgtaagctgatttggggattgggaacaagcctggcagtaaatccgagtgagtcttcgtgttaactctgtcaaacctgtctgtgcagtttgaaatatctcagaaactgcctccttcttttttagccctgaggtttaagatatctagttatggctagtgttttcttcctgtccaccaaagctgaacccttgcctacccctcaatcaaaataactagatagagggatccatatgagcagggtaggaaggccattggagtgttcagctgttttcttagagagcaaatacattcgtgcattccaaaaaggcctgtgtgggagcactgaatattacagaaggtgagtgtgtagcacatttcatggccgctttagtctgcactatgccaacctcaccgtgggccattggtaaatactgttgctttctggccaaagacaggtcaagtgctgggaactctcgggactcacagtcacgctagtgaccgtgctagagcacatctccccactgtggattatccagaatgactcaaacttgcgatataactcctgcatctctcagttctctttggcttagagccttattgtggatttgctagaggtaacaggaaaggaactgatttcatcctaattctagcctcttctgagaagttattctctgcaagagtcttcaggagcatcttacagaccacctacactattcagaattttgttccgcacaccacattgtgttcccagcagtgtttgctgtggctttggctggggccaggtcctgagtcagttctggagctccaggcttggcaaagctggataagggcaaggggagttgtacagcagaaccaaagggcttcaggaaagacatctttgatatagacattaatgaatttctaaatgggcttctatatgctaacctgataagactctctggggagaaggtcatgctttcctttgcagctctaaatataagacacatgcagaaaaaaaaaaagaatgggaaatgtctgttacagtgccaaaatgaagataatcagtataaatattagatttgtcttaatattaagtttatgaaatgtaagtctttcagaagaactatctcaggatatatttattaggtcaatgaaatattttatccatgtgactggtatacacacttcaaaggagaacccaaaatggcaggcaggggagggtggctaatgaaaggtatggcatagtagttaagaatatgaattttggaataaaactgtttgggtaaatcctaattcagaaggttacttaatctctttatgcctcttttttctcatctgtaaaatggggatggtaatagtacctagctcactgagatgttacgagatttaaagagctaatacctataatggactttgcataatggcagcccgattgaaagttttcagttaatatgtttttattgctactatgtcaggttgctggagggaaggaagaaaaatggaaatgatccccatttatagtttttgtaaagtacagcattagagtgtggctctagcaacacaggcaaactaatctttgggcaagggacaactttacaagtaaaaccaggtaggtctggatgtttctaagtgaagtgcagttatccactctgttcgttttttgtttaatcttctctgtctcaacttctaaccaaaaactcttactcttaggttatattttccttttataaaagtaagtagaatgtgtgtaaagtctggttgatatgatcctttctaactcacttggtttcagctagtggcaaaaagaagggtgtattggatctggaattcttaggttaaggctgagagaatgtgagtttggctgacttggaagaaataaaaacatcaaatgtgggtggttcacacaaaagaaggtgatttttcataataatatactaaagtagaatccacccttgtgaccaccagaattattcaagtacagtcttccaaggacaaaatgggtagcatggaaatgatatgtttttttggggggaaaaaacatggggagagagagagaaaggggactattagttgtctggattgttaggaaacatggaagacagcacttcttgttgtaaggtttggcaaaggttatcaccaagtagaagtccaaatgtgtgtaacatacccctggcaaacgttatagaagaaggaagctggggccgggcacggtggctcacgcctgtaatcccagcactttgggaggccgaggcgggtggatcacgaggtcaggagttcgagaccatcctggctaacacagtgaaaccccgtctctactaaaaaaaaatacaaaaaattagccaggcgtggcgggcgcctgtagtcccaactactacagaggctgaggcaggagaatggcgtgaacctgggaggtggagtttgtgccactgctgagatcgcgccactgcactccagcgtgcgcgacagagtgagactccatctcaaaaaaagaagaaggaagctgggagcagtgtctctcacctgtaatctcagcattttggaaggctgaggcaggaggatcacttgaggccaggagttcaagaccaccctgggcaacacagtgagacccccatctctacaaaaaataaataaataaaatttttttaaaaatagccaggcatggtagcatgcacctgtcatcctagctactgaagaggttgaggcaggaggatcacttgtgcccaggaggtcaaggttacagtgagccaagaacacaccactgcactccagcctggacaacaaagtaagatcctgtctctaaaaatatatatttaaaaatataaaataaataagttaaagaaggaggaaggagatgaagaaaatttggcttagtaggaaagcgtttttgtactgggcagaaacactgtgtcaaactggggcaaacaacctcttctttgggactggaacgagactcaccgttattccctgtaagtccttacctcttgacaaaaaagctcttagtctgtaatgacaagttctcacatcccagacacctaatgaatttctaaatgagcttccatgtgttaaactgataaaactctctagggagaaggtcacccttacctttgcggctctaaatgtaagacatgttgtaagaaaaattgggaactgttaattgcagtgccaaaatgaagacagtgattacaaatattgggctagttttaatgttagatttataaaatataagcctttccaaagaaccatctcagggtgcatttattagtttgtgtctatacagcccaattgtccagttactttgattaatgttggtagctgatgcagatatttagggacttccttgagaaaacttctttgtgctcaaaattgcatgaattgaatggcacattacctaaataattgccaaatctgtttcactttgtgctgtatagactcagcctaataaaaacaaatgctgttgtgctttttcccagtctgtctcctctccacacagaaagtttccctttctactaaacagcatctcttcacacgaagaaaagatgcccagcaagccatttgacttattgctgctgctagtttgcatttatatgactcctttccttagaagggatgaagacactttatacgacttattagctaaacagattgacagcctaattaggaagagagaaacagattctgagtatctttttgtggctgctgttcctaccccctcgtgtagaacatttggtcagatggctctttgagacagaaataagacagggacgtggtctctgcttgtagtgtgggacgtctcagctgcacctaagaggttgtcacaggagtactaaataggtcagggcaactgacacagccaggaaaatttctttcccctagaacttgtgtgtgctcaccaagcaaagcgtgactaattttgacatccattgttagtgtgtgtctacccttcttgcctttgttttcagacccttcctctctagatccttttccttccatctccaactcctgtatgtaaatccctgctctctcctttgaattcctgactgctatgcccatgcccagcaccggcacccccacgcacactgctgcctgcctctgtaaccatcagctgtatttctgaggactttcctagctccttgagtgatcctcaaatggctcagggccctgagggaatctttgctgagggttggccccagcagagccgctgcagaggtagaggtggccaccaagggacacagactgcctgcatgaaggctggagctgggcccaggatgaggaaaagcctcaggaaggaggggctgacacgaaataaggaataccatggcattcatgagatgtgcgtctgaatcctctctcttgcctgagaagctttagcttccaccttgagacacaaaacatgtggttatgaagagatgacaaggtttttgtaaaagaatgagccattgtggataggctttgggaatgtgctgcattgcgggtccggcactcaagtgattgttttaccacgtaagtatatcttttctcatttctgtgggctgttatgtccgtaaatcatatagaacagttcttcttatgcacacacacacacacacacccattttccagtcactgaggagaaacagtctctgggtctacctacacagccagtttgaccattaagatggtcaaattcatttttcaagataattttaactggttccatttaatgctgccaacagccaagggcattagcatgtcgtgggaacctaatctatgttcactcactgctgtgggaggacagtcatttcttcttctcccctggcagtcagacttcagaatccagctgaccttttccatgcctgtctcttctggcagattaagtggttatttccactaactttcttgtggaaaaacacacaagacagatatattctccttcagtttttactaagaaagttttgtggttatcattttgacaataaacttcagctagcatagtccctactattcatgttaataatatcttgacttgaaccatcatattttccccacatcattcacaatgcatttcaatgctgtaacccactgcaccatccccagcccttttatcttcacaacgttctctaataaggtaaacaggatcatacatcatcaaacatatgtcacagacagaaaagctgacacacagacaagttaaataatttaagtcaaaccaaaaaaaaatcataactgggattagagcttgagattccctattttcttacagtgaactgtcttgagctgtcacttaatgcattgaaaacataataagcacaggccataggcattttcagaacatgaaacttgactgaaacaaaaactgactgtttgattgctttggtgttttaaatgtatccccaaatctcctttgctattgatagtcatttggtgccagtgacagggaagagcagaggggcttaggaggtttttgtagatctcagtatcactgtgtcttataacaccgacaagctcatctttgggactgggaccagattacaagtctttccaagtaagtactagaaaccaaggagccattttgaaaaggtgttttctttttctttttcttttttttttaaatgaagttttgctctttgttgcgcaggctggagtgcagtggcatgatctcggctcactacaacctccacctcccgggttcaagcgattctcctgtctcagcctcccgagtagctgggattacaggcacctaccaccacgcctggctaatttttgtatttttagtagaaacagtgtttcaccatgttggccaggctggtcttgaactcctgacctcaagtgatctgcctgcctcggcctgccaaagattacaggccactgcgcccagccttaaaaggtgttttctataaacaggaacgttctcacagcactgcaggccacccttaccaactccgagctctgtaggggcctttagcacctatagctgcagaaccttctataaaccaattaatctatatgtgaacaatttaacctatatgtgaacaccatggtactgagtaaaatcttaccagcagtgaaaagaaggcactagagcgtcagatgcattatgactctaaacaaatgatctgtttccctcttttgcatttttatttaaaatatcagggaaggtgaagcaagttcaacttctccaatttgaaaactgtttctgaattatgcttcccttgtatgcagagagacctagattgactttggatgtttagtcattcgatttaatcaaatgtaattaaatgagcaaataatctccaatagccaatattcctatgttgtttcattgttttatgtgctttgctctagactttttgtctgggctttgtctctaataggatccccggaaggacagtgaaggtttttgttaaggtttttgtgtctgtgtggatagcaactatcagttaatctggggcgctgggaccaagctaattataaagccaggtaagtctcagagatgtgactgcacgggagaggagacactagttgaataatgcacaaagtgtagcatgcagattatatttttaagaacaagtcagcctgctggagacaatgcactcaacccaaatggggtctccactcccagtgagaagcatgtcagccgctaactcttttgtttggtctagtagcttccggaatgaataatgcttaagtagccctctaagagagcagagccaggttgttagggaatatctaattccctctgatatggttaaaactctttgccaagggcagaaccagcctcattccattggaagagcaaattcagagaaaaaggaaagggtcacacagccaaagacggtaaaatgttcaaaggtgaaaaatagccaagtctgcagctctcctgacatccttgcctcaggctgctgtcccacgtggagagcagatgcctgcaaagctctcggtcacttgctggagtcactcagggttctgggccttgggatgtaacttaaatgacagtgtcagggcactgtcagaggaatatgaaggctgcagcgatgcctgcaagtcagcttttgctacactgggactgaggtgttctaagcctggaaagacacaaagctgtcctcatcccaacctgccgtgcccctccttgagggttagtgtaaggctctgaaggactgtgtgaattatggtggtgctacaaacaagctcatctttggaactggcactctgcttgctgtccagccaagtacgtaagtagtggcatgtgtcaggtggattctgtgtccatggcaagtaggaagcgacagccacccttaggtggaaaggatggctgaaggttgactttgttcactgctgtcatctcttatctgccgtgatatagcaggctgtcaaaattcccattctcctggatggcacaccacagtcaggggaggggaaacatgctaattttatgataaaccccaggggagaaaaagactactgtgggaaaatttagttgagaaaatcaaattgttctcaactaaatgctgcaggctttatgcttctgtgaacccagtttcccagttattcattgaccctgaacatacgtttacctgtgcaaatacaatctctcctaacctatttatacaattatgtgtctgccggtccaaatgccttcttctataggccatgtttttatttctcttccaaaagagactccagagccatccttgggaagagtgctgagaagtcaggcaggcctaactcccaggggtcagggaggggaaagagaaggctaagggtaacttagctcagtactagaactgtgatccacgtatctgtcactctatttcctacgtttgcttcccttttgttttctctagaataagttctttttgtttgctctggacacccactgctcccaggatgaaaggagagaaatgagatcagttttgaacacttcctcttgaaatataaagaatcaacaagttacagtcatgttggggacttcttctctctccaagcttaaatttctattacgtaagccttacttttaaccaagaaagttagtgacatggtatcactgtctgggatgctcacccctctctcttttctccagatactccgtgtatactaaagctcagccaatgctcagctttgtgataaaggagctgttgtgtgtctttatctctgcctttaggatacagtcttttttataacagaaagtgttcacttctcccatttatttcatggctggactctctaccccttcctggctgaaacagcatatgggtccatggtggaacttctttgggaaaaaaaaaaaatagaactgtttgacttttgccactcttccctcatgaaatgttttttaggctatcaaataagcattattacacattgagaaggctttgaaaaaacttgatcactgagtctggaggtgagctgggatggctctgtagctggaaaatatccctgtgggtgtaggaatgtaccgtcccttcaaacttgtgtgtttagggctgagctcacacatacgacagcaagagttgttaacaaattagattcagctttggcagttttatgcctagaaatgcaaaagaattttaaaagctcataagtttggcatttttaaaggagacattgtttgctttatgttgcagagccaatttttcttcctatcataaaaggccagaaacacagagaaagcaaaaaaaaaaaaggaaaaaaaaaaaaaacacaaggagagtctaactgccccctcaccacagtgctatgtgtttggtagggttttactatgggtttcagtaaaggcaggaagtgctgtgggaataacaatgccagactcatgtttggagatggaactcagctggtggtgaagcccagtaagtggccatgttttattgatatttgaccaaacaaataaatcccgtgaagttagtggagatttaatttaatatgtaaacaaatctacttcttgaaaaatgacttttgtgaatacatgaaacactcgtgattattgagactagagcaataatgataaataaaggcaaaatgagaccaccccaaatcacctttaacattgtggcttagccctctttcttctagagagatatggggccatgagctatttacagccgcagtatctcttaaactatgttctgcaatgacttgtgtgtttactctgattttagccacagaatttgttttccattctattaaaaatgagaatctatctcattttaaatgctactaatatttataaggtaccttctttgtctcttgtacctgcatatatattcatttcaaaaagatctcataagaaacccaaacattgtcgcattttgacaaatgtccacatctagtcccgtaatgtcaaatttcactaaaaacacagcctgactatgcaaatgcagtggaagaaaaaaacaattcagaaatggattgacactcccaggtggctttataaacacctaaaaggaaatccagagtgaaataaaatggcaggtatgataacacgatttttttttaatgatcaattcctccatggggaataaaagtttttaaacttacctccttgaaaaggagggaaataggagttcaggagcctggcattcccaggtgtgctcctggggtgtctgtttctccacattgccattttggagacaataggacccatccaaatgtccaaccaaaaaactaatattaagaggctggagtcaccacattgactgtctgttattaaaccctataacaggttataattaagattatggaatgactaacccaaggagctttaaaataggatagcctagttttaaacggttcagccttgggaaatgctggaagacaaggaaatgagatagatgactccataggtttgttttacgtctggtgaacatatccatcccatgttaattttttttaacgactatgataaagagcttctttggggtcaggtagaacccaaaggaggaagagaaaatgggacttggttctttaagtgtcaaacaaggatccagccagggttgagggcaatggcataaggcttccctctcttggtggtgagagaccacatccatggactgtggaaggagaacattttctaaaagacggggatcccttgggctaaaatgaatgatgctcatgacccccagctagggcagggctataatgagtacagcaaacataaggcaaggtatcctcagaatttggtgacagggcaaattctagaacttaaggcttagagccagggtgaagggaagactctgtaatgcagttccttctcaggtggaaatccagatatgtgccctaagtgacctattcctgccccatttttgtttgggctctgaaaagtggattcctagctcagtggctgtctgccaggtatcttttgccttcagtaacagaattatgtttgatattggaaaggagtttgttgtattgttggctttataattcactctcagtgtcaaatgaggtcattcaacttcctctcgcacatttgcaataagcagcatgaaattcaagcagaacaactagaagacacagagaaagatggctgagctgataatgaggcctgtttattacaggagaagagacaatataggaatctgttaagtcccatgaggttgaaatatccaccaaaaaatatgcagctgtcccccaaaaaaaagtcactaggagtttttgttatggtcccaatcacagtgtgaacagagatgacaagatcatctttggaaaagggacacgacttcatattctccccagtaagtgctgtttatgtgattttctgacattaactcccactgagttcaaactgctgagagtgttcagtaggaaagtttctaagacatgtgggtggcctgtaggtcctgggctcttctcttgcagaggtccagtcctcagcctttccacagctgagccaaataccaaattctcccctccagggctggaaaagttgctaccagtcctctgctacccaaatataaattatttttttattgtttattaagaagagtaaaagaatcgtgacactttgtccagaacctattttccagtcttttcccccaggcttgtccctggtaacctctgtttggactcattgttaagcccagcgtgatttttggctccaactaaattgattttggaaatgactccagcatacctatgacccctctccttccaccctccataaaagatttatttttctttatttggcctctgctgagattcctggctttgatgccccaggatctctcatttcccttgttccagggataagtgagagatgactttttaaagagctactttcatcttagagacaacaaagagagtatgccagcaagagcaacatcttgcattgagccttctcactctatgccattttccaaatctttttctttatttaggataagtgaccactcctttttatttctagtacagcaaagagtacatcatgatgtcagaaacagggatttcctttggaatgtttttcacaggctaacaataagctagaagtctgcaagcaattcagaaatgcatccctgagctacaactccatgtatggaagctcatcagcagggtagacaggcaaagcagaaacattttaattataccatactttgtagagattgggggagaagtgggcaaatgcgtgctaaggaaaaacaaaaactatggttaagtggggagatttctagatggttctaacagggaagaagaccaacaagaggaaacttccaggaaaaccaccaaggccaggcattcagggtttttgttatggaggaaatcactgtgggaattcaggaaacacacctcttgtctttggaaagggcacaagactttctgtgattgcaagtaagtgtttctagccatccttgattttgatcagcaatggcttcttcccttgaattatttttcagtgtacctagaatgcttttgcccccaagaaaggtttggaaggagctgggtcattagcattgcgcaggaaaattacaggttattctgttataattcgaaagccaactggacagtcatgaatgcacacagatctgggccctgcattgcaccctggcctagttgcctccagcttgttctgaccgtaatcctggcccagtttcctcctctgatcccaggagacaaaagccctgggcagagaaccagactacttagcctgggggaagcacaaaaaggcttgtctgagatccataagccttttttttttttctttttcttttttttttttttttttttttgagacagagtctcgctctgtcgcccaggctggagtgcagtggtgcgatctcggctcactgcaagctccgcctcccgggttcacaccattctcctgcctcagcctccctagtagctgggactacaggtgctcaccaccacgtccggctaattttttgtatttttttttagtagagacagggtttcaccgcgttggccaggatgatctcgatctcccgacctcgtgatccacccgcctcagcctcccaaagtgctgggattacaggcgtgagccaccgtgcccagccccaaaagccatttttaaatacattgcaggtttctatttaatgttgttattcattttgatttgcccaagtaatacattaaaatttctcattgtaaaccattcaaattacagataaagtccaggcacggtggctcacacctgtaatcccagcactttagaaggctgaggtgggcaaatcacctgaggtcaggagtttgagaccagtctggccaacatgatgaaatcccatctctactaaaaatacgaaaagtagtcaatcgtggtggcaggcacctataatcccagctactcaggaggctgaggcaggataatcacttgaacccgggaggttgaggttgccatgagccgagatcgtgccactgcactccagcctgggtgacagagtgagactccatctcaaaaaaaaaaaaaaaattacagataaaaccagcattcaccttggccacttccttcagtatcagtttcctcctccccaaaagtgaccactgaaaccagcttggtgtgttgtgatgagtttctctgtggaatatgtttatgtgaaatcccatcttcaaccaggaaagcttgagagggaaagggctcagactgcagtttgcaggatttcaattagatataaggaacagttgattagatgtaagagctgttagcaaaggaaaaccttataaaaactaggagctcttaataactagacaggtctttggtcagacaacacactgactgaggacaggaggatggattcgatgacctctgaaagtccagccaggactctggaggactctgaggaatggtctgttccatagcctgcctctgtaatgcccttctctcttgcctattgtctggttgttgttacagtctgagcttttgtcagagctgctcctatgctgtgagtggtctgattttctcagcatctctggggtttttgcaaagcaaggaaactctgtgcatactctggggctgggagttaccaactcactttcgggaaggggaccaaactctcggtcataccaagtaagttcttctttctggctaattattcttcccgagaagcctgtcttccatcatgcagaagctgtcaaaacacaggtggtgttttctttgcttggtttgtgttgggtggttagtaatatcagttggaaaacaaggttattaatgcacatattccctggggcattgtattcggacatttaatatccatgtagtctctccctgtgaaaatatgtgaacctccacgaaaagaaaggtccaaggaaagtagcagggaaaaggcaggaattggatgaaaatagccaaagagcctgcaggaatataaacaaggcaggatcccaggagacagagcagtagccactttgagtgaatttcccaggaggtgctcctgccaaggcccataccttcaaggaaaattaaggcaaatagaattgggctggggagttgctacttattagtattcctcccacgttctaacctaattataaggaggttgttttggccatgggcagtcatctcaggttttgttttcctgctttcctccctaacctccacctgtcttcctagaggcctgagtcaaggttattgcaatagcactaaagactgtgtaacaccaatgcaggcaaatcaacctttggggatgggactacgctcactgtgaagccaagtaagttgtgttcttctttgcctaggccttcaggggcaatcaatcaaaccattagtttgaaaaagactttaatcctatgcatctggttgggctctttattaatgttctttccccaggccaaagagagttggttctcttccctgctttaaaatgagatatgagtgcatgtatgcacacacgcatgcccacatgcagactcttgctctagctcatggtaagggcttctcaggagcatatacaacattttgaaagaaatagagaaacaaacaataatgagccaatggagctgtcaggaaggttctccaccacccctgaccaggcttcccagcaggatctctggccatataggatgtgcttgcactatatcggatggtctaggatgggaaatatctctctgtaattaattccaaaatttggcaacccttattgccagaaagtacttctcatatctaagtttgatctccctgctgcgatttaaatatctacttgaaaagaaccactagaactctgtacatctggattgagaatcaagtaactgccatagaatatgaggctgagcactaagcccacctctgcagcacctctgacgtgtcatgggtcccctctggacattttgagctcaagtaataatggattaagcaggatagcacaagctttggaaacagaaaaacctgaattcaagtccttgctccactacttacctagctgtgtgaccttgaacaagttacttaatctctctgagcctcagtttccccatccacaaaatgaagataaaaatattcctacctcgttgagtcatcgtaaagatgaaataatacagctaaagtagttagcatagtgctcagaacatagaaaaagctcattaaaccctcgctattaataataatgataaacatcatctctaacccacagcagagcctttgtttggcccctggggctcttctgtcaaggttctgttgtgcatcagcagcagagctggaattggggggagggtggagaatgtcagcctgttctatgaaattcttcacctgggatttgaaagtggaaatacaaagaatcctgactaatttaaatacaaaatcatccaagtgtcagaggcaggggagaggtttctgcagagagctgcatagctgggatcctcaaggctacacacacacgcttggagcagggatgcggttcacaggatggcagggcaaaggttgcagaactgaaaccttgtacttccccatcaccaaaatgaccccagcatgatttcctttaaggtgtcccgagccccttcccaaaagacaggctccccatgtggaggggcaatgacagagggaagatggaaactttatgggaagggcgatctatcccaaggttgtccttctcctcttcagggtagtgaagctcatgagaaatatggctcctgaaaatagccactaaatgaaactctccaacctggaggtagaggatcagtaaagtctgcagaggcaaaatgaggcagtttatttcaaagaaaagaggttgagggcaaggtgggagttaagtcacacatctaaatctgggaaaggaagcattaaacagaagacggaggggctcggctctccacctccaccaggattcagaccacaggacatggctaatactgcaagaagggagttaggttagtggtaaaacctttctaataggtttttgaacagtgaaaatgagctgtcaggagtagttgccagggcactttctctagagagtttttgaaaggagatagacaccctgctatcagaggtgattggagtgcagccctgcctcgaggcaggaggagaaatgagagaacctcttaaagcctctttccagcccccagagcctgtctccatgaaaaaggcccaggctcattaatgcagagctgcatcctccaggacacagggggttgctgggttgttaagtttggaacctttgccggcttagtggttaccaaactccctttgttctcaagacttgacttgataaatgggctggctttatccctttaaagccaaaaacacaggttctgagtgctgtgttgtttgtggtgttgagatgcccaggctggagggaggaagctctagggggtttttgctgagcccagaaacactgtggggataactatggtcagaattttgtctttggtcccggaaccagattgtccgtgctgccctgtaagtacagttaagtggagatagaaaatgagtccagtgcttgatgtggggagaagctgcagggtcttgaggccaggagtccaccgtgacctcaggagtggtgatggagaagaaggttaaaaaaggaatgagaaacagaaccataaggacaatacagaggaagggttcattttcgggaaggaaaatcacaaggccgtgtgattaacgctggaggaaatgcactcctttggagggtcccttctcaggagggctttgtgtcggggaaagctgagctgttaggtttttgatgctgagataatcactatgcagaaggacaaggcttctcctttatctttgggaaggggacaaggctgcttgtcaagccaagtaagtgacatataatttatatgtgctgaatatgattatctccaagaggaaaacttgccctcttttccacgggtgcctccttgggtcaggaggacattaaaggtgttgagcagaccaaggcccagtacctcgtcaccttcttcatccttgaaggagctttaagaggtgtggaggggaagaaacccaccaggaccccaccaataagcccagccttgagacccctccactctgtcagacttgaataagaaccatctgagaacaaggtcttcctcagaaggggactccagcatagtcatccccatttgatagattttgaaactcagggcggggcagagtggctcatgcctgtaatcccagcactttgggaagctgaggcaggtggatcacttgaaggtcaggagttcgagacctgcctggccaacatggtgaaagcccgtctctactaaaaataaaaaaaattagctgggtgtggtggcacgcacctgtaatcccagctactcagaaggctgaggcaggagaatcgcttgaacccgggaggcggaggttgcagtgagccaagatcatgccattgcactccagcctgggcaacaaaagcgaaacttcatctcaaacaaacaaacaagctcaggcaagtagaggccagtgattaacactcttccaataggaacagatcccaagcaacctgcagtagtttttccagtaggctcgtgaactcaaaacaccaagttatttaaatgacagggcaaccgttgtgatcagctgtcatttgagtagtgctgaggactgggtctgaccttgagtaaacgcctaggctggtgggtttctatccctgcagcatctaaagcggacgcccaggcttcactgaccccagcagtctggctttctgcccttgccgcccaggaggtgcagctcttggcacacaccatccttagtgtcttgaaagaagagaaattaaaagagaaagggggaaaagcttatatctcatatcatgcagttgcctcattttgtagcaagattgtttccccatgagcagtttgtcttcattcagcagctgtcttctctggggaagccattttgtagaggtgtttgtcacagtgtgacaactgacagctgggggaaattccagtttggagcagggacccaggttgtggtcaccccaggtaagccccattccctggagcctcacctgcccttagtatttggcatgccctgcatgccaaatatttctagccgagactatgagaaacacatctgaaaggaagccatttccctgaacagcagtacccaaagccattaagcaaaaatgagagatcagactggtgttaaatagaaacgtttttggataaatagtaattctcattattctctatcagtctcctgtgtgaatacccttatttcccttataaggaaaaaagttacaataagcaggatagccatgattcatgctgtggtgtgggagcaatctgctgtggatttgggggtggaggattagaaatgtgttcaggcagactggatgtgtttttgacaggatatgtaacacagtgtgatttataaccagggaggaaagcttatcttcggacagggaacggagttatctgtgaaacccagtaagtataaaattgtatccctggattaagcaatgtctgtggattaagggctgatttagacccaattatacaccatatgaagaatgtttagagagggggatgagcatcaaataggaagccaatcgtcgtcctggctaggatctagcatctcagtgcaaaatgggctatgtaagtgtgcctctgggaattgctcctgaatatatgtgttgggactaaaatgtatgactggctacttgttgtattggctgggatcatatccctggatttgtgcagtaattggtgacaagatttctaattccttaacaaaccttctaaggcactattctatttggctaagattatgtcaatttatagaaggaaagaaccttgtaaataatgatcattaaccaaaagtaatgtgattagtctctctcaaagtctgaaaaaccacttttttttaaaaagtttactcatgactactgagggacacttcctgtttctgagactttcagccaaaaattcgtacagcgtagcctcacggagcagagagaaccttgacaacattcctttttgactttctccatggatgagaaaactgaggctcagggaagagacagatcccggccccacagccagtctatggctgagctagaactagattttaggtctctaatttgccaaacctgtcagttggctcaaacttgaagtttgaagagtccgcaagattcatctgacaaatattttcatgtacttgccctctgccaggctcgttgctgaaaccagggatccaacaggaagcaaactcagtgtgatattgccttcatgaaacttacattctggaggtggattccatgtttcttcccagatatgacaatgcttaccctgatttctcttgggcatggctctcttatactatcatcacttccttaggaaatactaaaactaatttttgctgcagtttaaagtccttgagcagataactaacacacataccactttagtcaggagaagggaaatgcccaaaagtgaagtagaaaactaggaatttgtctgataattgattattataaagttattttatcagtgtgaaatgagtggccaaattaactggacaatgccagctctgtacctacctcactttgattctatagactcagtctcaggaggattcaagaattcagacagttctctgatgacataatccagtgatgcccacaacagaggaggcgtattctctattctggactttgtgagtctccttggatgaaaagattcaagtgctgttttgacacctaaaatcagagagtatttgctctatacatatatcgaaaatacacagttaatgtttagaactttgtagtggaaagtggaaagcaaaggtcccctaaaagaaaatgggattgtaaagacgaaggagggttagtttaggatttgtagaaagtcagtttggctactccagaccaaacctagattaacagtgatgcaggcctaattcataaaggaagcactgccagctctttattcagtgctttgccaacctggcctgtttgatctggtttttgttgttgagcaaatcatagtgtttcttctggttctgcaaggcaactgacctttggatctgggacacaattgactgttttacctggtaggctgcctcaattaaatactatttgcactgatttactaatctacaaatgtattctgtacatgtaacttaatgggcctgaggttgaagatggggagagacagcaacaatgcatactagaaagggtaatgcgagcagagaattatttatcagagaccaagaagagaaagagaagctttttgctaaggcttttagtaataggagttaatgaaaatgaatagaaaaaaatttcattttaacttagaagaattgctgaataatgggaacagattccataaggggaacctctgcttctgaaaatatttgcactaggaccagcctacgtgctacaaaaactgtctcacaccaagtctagttggtcacttacatttttagcctattctagtagctatttctaaataagtctttaaacatagaggtgcctatatttaagatatttaaatgaggctctatttctatagctctctggtgcccttccagcaaagcattgctgtaacacattgcttatcatttctacaagtgagaacaagtaagcccctggccctccaaaattgcatgagtattataattacttggcttagattgaagtcacttctgtgttacttctcataactgtgttcatttgttgagatctgtttaactccaaactgtgtgggcgtctaactgttggcactaaggtttcttttctcttgaaattgccagcaaaatattttacccataaataatgtttcatctagacttgcaaatgacaactaacactgcaggctctttttttttcttttgctttgtttctttttttctgaagggaatatgcaagcaggaagcaaaaaaaaaaaaaaagccaaaatgtacagtttgactgtggggtctgggaggagagtgtcaatgtggatgctaaaatatacatggttgtataatgtaggtactgtcacagagaggctatagtgatcttattagatcatacatacagagcaccactggtcagctggcgttgctcggggtgtccttaagaaaagctcaggtctagttgtcaagtgcaacccagattcagatacagagtctcagagagaagcttccagatcaccctggagctaaatgcagaatatgaattttccccttagttaagtctacctgaggggaattttcatttataattaggaaaagagaaaggtaaagaacatttacttgcagtgtcctgtttcaaatattgtgtgcattgagcacagaggacacaagaatgaacccaagcagaaaactaaagaaaagaaatcaataaaaccactgaagaaaaccagttgcccttatcttgcctgtctctgataatgaatgtgccttccctgctcattcctcactttggttctcaaattttccagggaattagcaaagaactggtagggttgggttagtcttggtctaatttggttagtcatctctggataacaagtctcctttttaggaagtgccaggggattttttgtaatgccaataaacatggtgtacaacttcaacaaattttactttggatctgggaccaaactcaatgtaaaaccaagtaagttatagttgcctagaagaaaaagttaccaacacattatgctaaattcttcttttcagtctgtatttcagttcttttattttgcattttgggtccccacccatgatattttattagtccttattcatatgtcacttgaacagatatgtagtaaacaaatctcatgatcgagtagacatgctgaaactgccaatgttctcaaggtgctattctttataaggaaaatgcccaaattttaactgttgctactgaacaaaagagcatttggatataatttaaagcacccctgaatgtccaggatttcagagaggagacatgacaaattaaaattatatgtattatttaaagatgaaaagaattagatcctcttgaaaatactctaataactaacatttcttcaacattcgcaatatgcaaagcacctttcataccttgactcatctgaccctcctaacaaccctctgggatagatattacctatctccgcttccacagatgaggaaacagtgtgaaaggtaaaactaaagcaaagaggttgaaatagttacccaagggctcaccgcagatgaggggcagagctagattaagagcctggcctgcctgtcccctagcccactctcttaaccatggtcttggtgaggtttgtgtagggcgacctcgcactgtggttctaacgactacaagctcagctttggagccggaaccacagtaactgtaagagcaagtaagtaagaaagaaaagtccagaataattttaagcaaaatggtgggtaggtttttcagcaatttcacctaggaagtgcaatgtcaagaactaaattctaagagctttcccagtttgtgttagaaccataatttttctacctcacacgtctccctcgccttctctgtcacctcagaacagctcctcctaaggcatgacttcacaatggtacatttgttggtggcgcagtctttgtggtcagataaaaactgagctaattatctgaaattatctcaggtctctaagtgagagagttaactcctttcaaatatttgaagaactacgatgtagaccaggtaaggggtgagtgtggaggccaaatcaaaacgagcaggtgcaagatgtgccccaacctcccctcaaacattgttgaacaagtggaactgccctgcagtggaaaggctgctttgtgaagtatggaacttttcttccttagatatcttcatgccagacccctaaggttaaccatgagatgttgcagaaggcacttctatgccattttagctattagattgaatcacctctgggctccctttcaaatctaaatgctaagatcccatgactcaagcctggaggattaataggtgagctcagacttgtttcttctatttttactattttgatagccaaagaaataattcatcaaattattcataagctaaagcctacttgggatttttacacctagaagatggtggggtatgatttcccagtgcagtaaatgagaaaacaataggagacatcaaggaggaaaaaaagaaggaagagataaagggaatgtcttaagggaggctcagaggttgaatgaaggaaatgaggtgattttgcagaggacagatgtggctatcaaagattttacaatttcacctttggaaagggatccaaacataatgtcactccaagtaagtgagcagccttttgtactcgaaaatagggccaggggagcaaagtttcttccaatttaaacacactcaaaaggatgtgtaattgctttctgatgggagggaactctgaaggtagaaagactattgttaccacagatcacttgtccctggagatatagcatctgaggactgactgtctagcttagactgctgtctgcacaagaagaagacttacagatgcttaaggaggatggaggcaaattttcaaccctgtactccaaagctgaggggagaggggatgggaaacattagggctgggttcatgtaaaggggaccagcattgtgccgacagaggctcaaccctggggaggctatactttggaagaggaactcagttgactgtctggcctggtgagtgagtcgctttctattccaggaaaatattactgtggagaaattaaaaggggagatgaattaactcctttagtcttgaaactaaagagatatgtgtacttcccctcctggaggaccccagtccctaggtagattaggacgaggaagcagagggagacaaaggcgatggaaagtcccttttaggaacccaggaatcagagagaacttgatggtccccaccaaaggcaaagaagggaggtcccactaaaacatgtgagcatcctaaaacacctgctctggtccacccacaatatttggtgaaggacatggccctccacccagaatgggcaagcaaactagaccagctttctaaggtgtgtttttcttgggtcctgtgactcttggccgtctccctgtcagaggctccatctgtcgctgcactctttcttattgagaatggcctctccgtggttctctgtaaactttccccaagaagcctgtttccatgcttcctcagcacttagcctcaccgatggatgggctctagagtagctggagggagtctgggtctgaaactttcactgagaaagtaaagttgatccgcagtatccagtggatatggcagctgggaggacctaggactgaagtactcgtcctctctttggggcctttcctgggcactcgattgaatacagaaaccctgttagcaagtgcatgcatgtatatgagtgtgttcattcagcatttccattctgaatgtatgaatagccttactctgaagactccctggagcttacagggctttctgttttcagagaaaattgcctttgtgagacaaaaatggccaagtgggcccctgaatgaggttatggttgagagctattaatattatccttattcacagagcaagatccgaattcccaaagcagagtagacaataactatgtgaagggcttagacccaaatatgtgcccacttgcaagcattccagctctatgaagaggatacagtgctaggagataggattaccctgcacattgcaaaccctccacttttccaagaccatagaaaatgtcctttgttgagcaccaactgagtgttattttcttggtccctgtggtttttgctgggccttaaatcattgtgtgatcaaagctgcaggcaacaagctaacttttggaggaggaaccagggtgctagttaaaccaagtgagtactggggcttgacccacaattgagccttgtcatcaatttgcaattcaatgtgccgtattggcccaaattaatgtctcaaacttgtctttaaaatgtttcatgttgctcttatgcataaacatgcacttatgtacaaattcagcatggataaaggatattgtcatcttgacattttctagaatctattttcttaagagaaggcacatagtaaaaggtacttttcttatttcttcacatttcttaactgattttcccaagaggcagaggaacttggacgtggcgtttctgtctattcagagtagttgatttgaatatggttacaatagcagagcaaggacttacaatttctaaggttcaaaatattgctgtctgtaccagcctgcagcctctataaccattattctgatttatttcctctggccctcatttttcccaattaatgtaactgaaatattggtaaccattatcttccggttcacagaaagtgtgtgaggattaaaaagtcgctgctctgaaaaggaattgagctggagggttttcttttgggggattattgttttgttgatggtattgtctctttcattgagggagagaataagaaaggaggcatacttgaaaggcaaggtaatatgatcaatacatgaacgtgtgcaaaataaatcattaaggcattcaactagaagccaaaaaacagtatggaccccggctcagccactcactcactaggcagccatgagaagatcaccaagctctcccagcctcagttaacctaaaatgtggagattattattccagccttgactacttcaaaggatgctatgaaattcagatgagataatatatgtgaaatctccttgaaaaagatgggtggtcaaatgattcatgatttttttttttttttttttttttttttgagacggagtctcgctctgtcgcccaggctggagtgcagtggcgggatctcggctcactgcaagctccgcctcccgggttcacgccattctcctgcctcagcctcccaagtagctgggaccacaggcgcccgccactacgcccggctaattttttgtatttttagtagagacgaggtttcaccgttttagccgggatggtctcgatctcctgacctcgtgatccgcccgcctcggcctcccaaagtgctgggattacaggcgtgagccaccgcgcccggcctcatgatttttaatagttagattttatgcaaaatttcatttgagggtaaacttaaaggtgaacaagtttaatggactttggccatggcagagaaatggttaggtttggatataaggtggacctctctaattataagaaaaaaaaggaacatgagaattggtgaacaagaccttccctggagatcttcagaaacctgaggtcactcaggagagaaatgtgtgaagttgagagcttacagtaaatggtctctgaagtttcccaccattccaaagagtgcgtgagcttaaaatttttcgtgagtttagctaaatatgtgcttagtgttagattaggtttcaaccaagcaaaagaaccctgggagaagtactctgcttggaaatgaagcatcctttggtttttgtggtacaatagatcactgtgggttttcagatggccagaagctgctctttgcaagggggaccatgttaaaggtggatcttagtaagtattattactaatgaattcttaattgattagtttttgagacaagtaataagcttttttggaaatctaagtggactgccaaatgttctcgatttatccatattgcatggggagcagagcattcttcatgccttctccatcctcacttctgccaggtagcagtttgcattgttaacagggaagcagaatggaagcttaacagagaagcagtatggaagacgtctccttagcccagtggtcagttgcatcagagaagtctgctctgaaatgcgaacactttctcttgcagctggcagccccctgcaacctcagtgccctccatggccagggccaaagcttccaggtgcccagataacatcccaaagtcactctgagagaagagagaaaatcggtcttactttaccttttctaaccaggaatttacatggttagttttacatctaacacttcagcagggagaagacatgatctaagtgtccatgtggacactctgtgtgactcggatccaggatctgctctttcagcccctccatttatcgcaaaagggatgatgattaattcctccatgcctagacttcactttagacatcacctcagagaggcctgtcttacccagccaatctaacaagccatcaaacacagccactgcctggctgctctctaccctgttatttagcctgattttaattcacacactttcatcacttaacattatactatctgtgtatttattgtttgccttcttctagaccgtagacaccaggaggacggggacagtgtctaagtggctctcaccgtatccctagtgccggcacaatgtctttacacatcggaggtgttcagtgaacagttactgagtgaataaaggacttagcaccaactgccgctctttttcatgaaattacagagctttgctatttcatacccaaatactaaaacctactgagatttttgcaaatttccatcatttatagttatatccaaggtggatttgagtgagcaggtacatgaggtatttgcagggcctcatttcactgtgccaaccaggcaggaactgctctgatctttgggaagggaaccaccttatcagtgagttccagtaagtacctgataattattgatcatagtgcttgtacttatcctgtagtcatatattgcacaggtgaccaaatgcctcctatttctttgagttaaggaatattgacatttgatgaggaaagccatttaaacacatgggaaaattggatgttgtctctcacccctaatactccaaccatagcccctgtcctattccatgctcttaaaaaaattttaattgatagaagaaagaaagattatctacaaggatatgagcaatttgctaaacagtggtaaaacgagattatgtacaggtgttgattcctaggtaaaaatgggggtcagagctgctatcctttggctagtaaaacaagattacttggtgaaattatgtaaatctcctcgaaagaaataagtttcagagttgtctagagaatatcacttggactgttctcaggctttccactacatctattgtaccactatggtgccctgaaaagaggctttctcaggcttaattccatggcttagtctttattccagtatcaaaaagggggaatcccagccagagctcccatgagggaggatagctgcatgctaaccacattaatctattatcaaggtaactcggtcatttttgtcaggcagcacagtgctgtgatttatagcacattcatctttgggagtgggacaagattatcagtaaaacctggtaagtaggcaatatgtcactaaagtaggaggcttaatgtggctactgagacccactaaacttactgcagtatttggaaggcccaagtgtcaagaaattaatggtttatgcagacttaagtggattccaatgaaggaagaaatgttaaagtaatggcacagaggatagaagagctagctgtgaaaaaaaatagccatgtggatgaaccaaacgcaacagactgaaagagcctagagagttgatcctaaagaaaaaggcagaaagtctggctgagcacttccagttctgctgacctggcttgattagtgaatctgggccacagtatctttatctataaaatgaaaacatttaatatcacctcagattttttgttttaattttgtgggtacataataggtgtatatatttattttaaagataagctaatatatgtgaaagtattttgtaaattcttaaatgctatccacatgtaaaatattatttgtttatagaacaaaaaaaaactatgtcagatttagaattcttttaacatgagaatttgtaggttcttagtgaaatagccatttacatgtgatctgtagccctaggcattggtaaaaagcactttctcttctactgaaatatagtggctcaaatgctacccaaatgaaaagggcaggggaagggaagtcattttgtaaaggcaggcattacagtgtgaattctgggggttaccagaaagttacctttggaactggaacaaagctccaagtcatcccaagtgagtccaatttcctatgctttcctcttccttgtgttgtcttctctcagaccgtaacatttggagcacataaagagatattatgggcctgctcttttctggctgtttcaggagactgaaaaggattgtataagaacatcctttagcatgttcttagtattgttttgtccagtgtgtgtttcttcttaatatcaaaaaaaactaagacattgcctgtgaagccaatggaaaacagtagatttgcaaagaaaagaactaaagagaagacaagtggtactttttaccaagcttaaagcagagtgggtgtcctttaatcagagggatgcttggttctgggggctggataggactcaggtaagtaacaaggctaccactgagtcactgagcttctaaaatgagttgactcgggggagcaggaagctgccactcatgatgatctgaatgctattccgtgaagtttcagattgattgaagttaaaattaggggtgacactatgtcaggaatctaaaaattgataactgtaatggaaatgaaagaagggctagctacatctgttggataaatggagttgaaaatcatgaatttgatggcgacagacccagagagttgggcaggtagaaacttcatttcaagtgatatgcagtaaataccccaaatttgagtcaaatggcctgtgtaaaaaggaagtgaaaatgtaacccgtatctccttgtaggtgaaaaggccatatctctaggtcttaggtatgaaaaggatgtgtgggcttctgggtgtttttgactgactaagaaacactgtgggatggatagcagctataaattgatcttcgggagtgggaccagactgctggtcaggcctggtaagtaaggtgtcagagaggcaacagaaagattgagggtaaaatgtcttcatgtctcaggaaatgattgtataatgcaaaatgagctggagttttttaggagcactgttactagagttctgatgtctggttctagcaaaagaaccctaatatagctgtaatccctctctagaaggaacaaggaagaggattcttctctgaaagctcctcctaagatttatccatcctctgccaaagtgtcttgtggatccaggatacttacatctttgttagcagtgctggcccaacctgctcagcctcagatcacctatccctcatttgtaaaatgaggataatatttaagctcatggcacagttgaagcccaaatgaggtagtggaatatatgcagattattaatccatttggctcataaatgaaggttttctttccttttccctaagtagatcatgggttgaaatacctaacactgcaaatcatttttgtatggggatttgctatagtgtgaattcaggatacagcaccctcacctttgggaaggggactatgcttctagtctctccaggtacatgttgaccccatcccacccatgttttccccctatctggtttaaggcttccatatgtattgcgtgttatcctcatggatttcatcatccttgttttattatcaatgttctgtgaatttaagattgagcctccatggactcttcatttaaaaatgaaaatagctaatagaagagttggaaataacagtagaactaattcactaggtcaggatggagaagggagtaataccctagacaattaggacaaacgtggtttttccagaaatagactcacttcctgtttaaagcctagactgtggtctctccccgggcacccttcacattcctctaaccctccatatcccaaatttagctgtggaatcttagacaatctgtgacctatgcagctacagaaatcttttcttactgagaatatctgcctatttgaaccaaaagatccttgagaatagacagtctctaatattccatgaagtgtctgatatggtccttttacaaaagtaaatacttgataaattcttgcttaattgaagttaaacacccaaagaaatcaggtttccaggccaaagggaagaagaaaattaagcaaatgacacagtacatttgagcgtgtagtggggaggaagaaatgctagattgggattcaaatagagccatgttttggtctctgctgccaactagcaatgtaacttagaccagatctcttgcctctaagcctcagtttctttatctgtaaatggggaagtgggtccaatggcctctctggcctcttagtacaaaaagtctatgaatgtatcccatttggggcacttttttctcctaggagtaactcaatagctattttaaagcttgagtgttttctaactcattagagcacatcaagaagaggggtgaagtgacaaaagggagtttattgtgaggcatcaaacactgtgatactcacgggaggaggaaacaaactcacctttgggacaggcactcagctaaaagtggaactcagtaagtatgagattctatggtaattacaaaatgtattctggtgacaataagtggaagaaaaggtgatgtaatttttgtcattgtatcttatttttaatctattactgaagcattaagaattgtgacatccagataaattagtgaaagtattcaaaggctatataagcatgctttcgttagggtggaatttagctaaccactaagactttttccaagatatgagattttcagctctcttcaacgtgagagtttttaatactagtattaagctaaacgatgctcaatggaagaaaagagctagaagagcagaaaattgcaccgtcatgatcaaatagatcctttctacttccactgccatggactcagtggtgcatttagaagagggtattcaaggtcattttagccatgccccaaaaaaaccactcccaattcattccagagattgtgcccccttatgctaaacatcatccaagaagagtcagtgaagtacagagaaaggaacccagggcttcttgtttcggtccagagttctaggtttgatttggtcccaactggatgtgtgatattggaacgagtcattgcccctctctgcacctcagactcctccagtggatgagggggtcaaagccctcaaaatctgttgttctgggatttcgctattataccacccgagagtttataggactcgagagtatggaatcttgtgagtatttcataaacaaattctatgaccctcaggaaatagccctgttaatcaacaacctaacttaacatagaaataataaccaccatctcagtccctaccatgtttagatacgatgctagatgcatgacatgtagaattgttcatctgaaataactctgtgaggtaaggggaagtatcttattttacaaaagaagaaactgaggctcagagaaggaagtgcccaagatcccaaagctagtaagtaaagggcctaaatttaaacttgggtctgcctgcctgactaaaaagccctgctctttcttttattttattttattttatttatttatttatttatttctgagacagagtcttgctctgtcacccaggctggagtgcagtgcagtctcagctcactgcagcctctgcctcccaggttcaagcgattcgattctcctgcctcagcctcccaagtagctggggttacaggcatgcgccaccacacctgaaagccctgctctttctactgcatgatgtcgtagagcttgtgctctagtttacttagaaatgagaggtgatgccaatcacagtgactggtgaaatgcttggaatttatcttttctactttagatattgctgtgagttagagagggtgcttcgggaaatcttgacatggatgccccaagtgtctaaagagttctcctcccctttcaatgacaaaacaaagtacagagttgctgggagcatttaccccaatagggagaaaagagaggggagctggctgcagccactcccttgttctgactgtccctttccttcgctgtttcttgtattttccccaggcagaccagccaccaatataactgatctacaagagcctgactcctttgtgagttatagagaaatgcagggtgaaggcactttgcacatagaactttagctctgagagacagcctcaaaatatctagttcacccctctttattttcccaataaggaaattaagacccagagaggttggctgaattgtctaaggtcagtgcgaactagggctgggactagaacctggagatcctggtcctggggccatattctgtgactgctgtttggtgaactaaacttctgataggtaggaagtgtgagttatgctcataaacaggaaaaacaaataggttttacaaggggagtataaaaatgtcctccttattactagcaccttagtataggctccctagacctgctccccagctgtggtgtaaaaatggaaggagaaggaaatggcccattttgtcgcagtgcaaatcactgtgggaaatactggaggcttcaaaactatctttggagcaggaacaagactatttgttaaagcaagtaagttccatgaaataacctgatttatattacagttgaagaacatctgttttcattgatttttttctttttagggggaaggggacatagttttgtctgccagttaaattagaagatacattggcaataataatgttgcactgtacagtatccatgggcatcactcttgcaagaaacatgtataataacaaacagttaagtgtggatggataaaacttccctaggtcctatctagaactgaaactctgtaattatattaataacttttttaacttgaatattagtgacatttttatataacccaaggtatacaaagcagaatcttcagttgggttctatctgatttgttgtcatcttccaatggtcttaggaaaattaaggttaaatagtaagattagatgcctcctaccactttggtacatgcatgcagacatagaaacacccttagtaactaacttgcatgtgacttggcaatcctaggctatggcccagtgacagggtcccattttgtacagagttatgtcagagtgtgaacacaggctttcagaaacttgtatttggaactggcacctgacttctggtcagtccaagtaagtcaaatctgcagaaatgtgtagccctatcctcaatattgggcatatatggatataattattctggtctataatagattattattactactattttgttcttattaatcataacaatgctgctaatttcaaatatacattttctgccatattattatttttacctttaaggagaattattgtcaagatatcaggagggaaatatttgaatttcctttgagtcaagtttcttatttgttcgtcagttcccacctctctgctgagggtcatatgaacctcacgatgttttggtttttataccgccttcttattatctctcttagaaatgcttccttggtttttccttgcctaagcacttagattttgcagctcacatttacccagagtatacttagcttttaacctctcccaaaactggcctccctgtcccaataattatgcacagtaaaagtcagttcaattcagtaaatgattattgagtatcatcaacaaaccagggaatcatcattggttttaaaagaaagaaacaaagaaaagaatttttaaaaccctaagctatcttaggcttctgatctcaagaacttccagtcttatcagagaaactaagcactcataataaaaagtctaacaacaatttatatgtgtatgtgccaagataggggggtgggtttcctgagggctggagacaggacaggtatgaccatgcacagccgcattctttggcagagaacacacatgattcccccaaatatgtttctggaaacggaattgagtctgttctgtgctgagatctttgactttcttgaggacaaaagcccccttggcagttagcatccttgagcgggggtgaggacagaaacaggaatgagtcaggcgtgagtcacccaagactctcactcagccccaagaggatggagtgactctgagtcatgccgaggcatgtctttagcatgtgctccagcacagtgtgcatttatggcaaggtgaaaaatacatttttgcacatgtcactaggaaaatggtaccttcttctcaggcatggcagatgaagtaggaaaatgcccgcctgctctctggtatctttagaaatactcacacccatccagcctatgtaggatacaatgtttttcatgaagttttatgaagattctgtttttcccaaaggagaaatagccaaagctgtgtttattgatagctgtgatgaggaaaatgaaggccaacaggtagcagtggggtctggtgctgtttataccctttagggaggttccttcaagtcttcataccacccattacaaggaaaactttagcatccgcctttcagggtttccagatcttagagctactgtgaaggggatgtgtcttcagagaaggggtgggcaaaaccaggaggtttttgtaatacacttacacagtgtgactatgggaacaacagactcgcttttgggaaggggaaccaagtggtggtcataccaagtaagtgagctgggatcctcctgcacaaatggccacagccacccccatccctaccctgtgctggagagcctcttatcatatttccatgggagcgggggaaggacatgccattcatcagtgctatatcgaagaaccttaggcggccactgtcccaaatctttgcctgtccctggtttctttcactctccccttctctgcatctccactgaccacactcccattctcatgtaagctgcccctgatcttccctgaggctggatttcagattgaacaaaggaccacaaaagtgagagctggaggggaccgtggggacatcttgctcatgttgcagagggacctgatgccagggtctagcatctgtccaagaccgtgctgatggtcagtgcacagcagtggaggggccccagccctttactcccaccctgagtttggtggagccacacagctctttgctaagtgaccctcaaacccagtgtgagataagctgagtgttgacagtgcccacctgctagggaaccaagtactgagttcctgccccagctcaggactgtggcgcaggccatgacctccctgagcctcagttttcatatctctgaagtagacagcatggtctctgtttcctcccatctttcaaaaattctatggaaattattgtgacttttttctctgtaattgtagggtttcacagaggcagggccttgtctgagtcaaggtcattagaaataaaggaatccaagggctttggatgccttggcctaattctaggtggtaaagagggaaggatgaaagcacaaatcacaggaagtgcctaaatcctgcttggatttagtgttgcctcaaacagggatatgcagaaatccaaccccagggtctcccataggaagaagactaggagtgggaagtgccaaagagctctggaaaggaaaagagaacaaggagcactctgagaaaaggaggtcagaacagcttcaggaaaaacgtcacataaaatttcctttgctctctgtcctcgcagcactttcagaagctccttgcatctgactaaagagtagcagagccagaccctcagaatgtctgccccaagcaagcagagtgtggtgtttgtattggggtgctgggagcagacatggggagttgctgccctgcttctctgctgatgggaaggtggtattttcccctgggtacacgggggccaaagagctctccagtccccagcccctggctcccgcccctgggctccagcactcgggggctctaaggacagcagtaggagactttctacaactcagagagtattcaggagggtttcccaggatgttgcccaataccatggggcaattggtagagggaggtcacatgaaacaggttttatcaaaggctgtcctcactgtgtgcatcaggaggaagctacatacctacatttggaagaggaaccagccttattgttcatccgtgtaagtattatagaaatgatcaagggaaattttgcagacagattatattatggaaggatactgtagtagtgagagtttgtgttgtgatctattccatcattaaaggagtcctttgttgcctgggagtaactatcagtgtcaggtctgatgagatgattgaggctgtgccggacaagggttttgcacaatgatttcagaggacaaatccccaagttgtgaaaaaagacttcactcttggttaggtttctaaaacagaactttcttcttggcaaccaaggggtctactctgccccctcactcctatgtctcttccacctgagactctgtcaccacctcccctagaatccgtgagataccttcccctgaattagagcataccagccagggtgctgaggcactctgtggtactggaatggatggtacagggatgcgtttctgggcttctggctgcaagaagcctcatcctttcccccagtgtaaagcattgctgggaatcatcccattatgagctactatttactgaatgcctgacacgtaccagtggccattctcttgtcttttatgtaatcctcattcagtgattacacacatcctaataataggtagccgatattttgcccattttacaggtgaggaaacagaggcttgggataagtaacttatccaagattatatagccacgaatgacagagctagagtttaactcaaatctgtttgactctagggccttgttattaaccgtgccaccaccatgcctcctgcattctgtgaaggaagacttcacacctcaaaggccatctgtttggcctttggtttgcccatcctgagccttcttaccatagcgaccatggcatggtgactcagcacttctgaagagatcagcagagtcattgggttgggtggcagaatacaggtatggcagggagggaaggagaaacttagggggactgtttattgcgcatacagttagagagaaagaaaaatgtatcaacaaaccatagaataggctgcttaaaagtttttctcccaagaaactgtgagtgtatgagggtcatgggcagctgcccccagctggcagagggcaggattttgtactgtgatgtaccagggtgtggacacgggcaggagagcacttacttttgggagtggaacaagactccaagtgcaaccaagtaagtacccaaacttaggctctggccaaagacacagaaagcccctactctgctttcttagatgatgaatctgtacttcctgaactaatttttcatgtttctttatgaggcttgaatatcttgaaattttaattcctagccactagcttaatagtctgttttctaacggtagtatttgccaatgggaattggccatttcatcattgcagagacagattcctttgagacaaaagatctttatcagaaaagaaactgtgactgattatgccaaaagatttatttttgttccatttagttttcatgaaaggtgatgaattatgcttcccaaagactctgggcattggacacactttctcaaaactgcacatccaattgagagatataggaagaacttagagcctaaataatgccataaaaataataaaaagtttgtaaaaaggaaccatatagaaattaaagaagaaatgaaatagtcttaatgaaagaagataacagaactgcattagaaacgaatggaaatatttagagggtttatgtattcaacaaatatttattggacaattattttattccaagcactatgttaagtgtgaggaagggaatgggagggaagggaagggaaggaaaggaaagaaaggagaggaagtagaggaaggaccgggagggagggaagaaggaagaaaaggaggaaaggagggaaggagggaggttctctttcatccagggaaggagggagagtctctgccatccgggagctcagagtgcaaacagacaactatagcctattgtcaccacgtcatagtggaggtacatgcaagttgcaatggaagcacaacagaagacatgactagcctccaattctcattgcctggtacatacacacatcctccactataccttaagctccatgagggcaggaccctttttcatcctcacagctctacagctcagcacaatgcctggcacataggtgtcaccaaacaaatgattgtggggaaaaaaatgccttctggctagatgagttatgatttatacattaacaaatattctctaacagagagagttgttagacctcaaaaccaggagattgcagaatccatccagatgtctgtggtgggagaaggcccatctctcagggaagagcacctctgtatttatctgttcatatgtgtgcttcatcaaagcctcttctcagccatggttcaggctgaatttataaagcttgaaacctatcgtatttctcaagaatcagagatcagaggtggaaggtttacaatatctcgataagtaagcagtacaaatgagttctagcagtaaaaaagaaagaggtctaatgataaatatatgaagcctgtctccacttgagagacctcctagaaaagatttgttctaaggaaacttttctccattaggagcagaatcatcttggaaatatacagctccaagttgtgttagaaaggtgtgtacaaagaagaccaaaaattcacatttggaataaggcattaaagttgccattgtttctagtagggaaaccctgcaaagtgttggggcatcgtagatcctgcatgttgacgcctgcaactaatctgccccggagctgttccgacagtggctggagcatttgctgcacagttgcataggtgttcaacaattgccaaaataaaatgaagctatttcgtgatgattagaaagaaataatcagcatcaatgaggcctctgatgcatcttcaggagtgagtaggtggaatgaagacctggtaggtgagacttttctctcttgtcagagaaagtttgacttgggggagcctggaaaacagggacaggagatggagtgccccagccaggcatgccctgcccaggtcagagttcttgtaaagcaccatctgattgtgtgttttctggtggctacaataagctgatttttggagcagggaccaggctggctgtacacccatgtgagtatgaccctgcaagtgaccagtgcaaaaagaactgaccacttgtctatgagaaaacaggtgatgatctatagcaaacttggggatatattgagaagcactcattttccattcctacaagctctcttggtgacttaaaatgttcccatttctcatatgaaacacagaagtgccaagagccaattgcgtaaatgaaaatctgagcagaataatttatagaaacataaaaagagttccaaataatgagtgctttcaagtgaagctgataatatcggcaccagataatctgaacattcaggaaattagctaagtgcccttgggggaaagagatgagttaatggcaaacacaaattctcttttattgcagcatgtagctaaattccctggattggctaataaacatggtatggggatccctactcatagaatcttcctctctggagttaggagagttttcagcttcctcctaagggtaaaagtggcccagacccctaactgaacggcaagtataccacatgcaattacaaggtatagaggcagcaatgtagagggaggcccacagacctggggaaaatctgggctctactctcactggctgttttcaataaagcctccactttctcagcagcaaaatgactataactacatcataataatatgagataatggccagaatgtaaaaagtgatcaataagtagtagcttttctaaaatattattataattattattattgaggctttgcttatactaaggtttacactatcataaagggaaaggagaatcgcttccttgggaaataaaagatgtaagcaacaaagacccaaggagccttttagaatgttgctctgggaccccagtggcttccagcagattagcatcaagaaggttatctcaaagaccttacccacagtgggggtacagcagtgcttccaagataatctttggatcagggaccagactcagcatccggccaagtaagtagaatgaagcaggagagcaagggaggacggacaactatttcttctttgtccaaaatgccaacttgaacccaggtattttcctctgtgggctccaaaatggtttcttccacccatccccagaaaatcctcccatccagctctcggtgctctgcagacatcatccttaggctgggaccttaggaaccatgaggcaggcaatgagcgagtactcctgaaccttccacaaacatatccaagatactgctgcctggaattgaggtttttgttctagggaattattggtttattgaaatcatatgaagtcacaacctcagcccagggaatcacagcagaatggaacaggaggagaacttttgtatcagaagcgaaatttcagtgcaaaagagcagaaggtttaggcctggcgtggtggctcacgcctgtaatcctagcactttgggaggccgaggcagggagatcacaaggtcaggagatcaagaccatcctggctaacacagtgaaaccctatctctactaaaaatacaaaaattagccgggcgtgatggcacgcgcctgtagtctcagctactcgggagactgaggcaggagaattgttgaacccgggaggcagagattgcagtgagctgagatcgcatcattgcactccagcctgggcaacagagcaagactccttctcaaaaaaacaaaaaaaaaaaaaaaaaagaaggtctaacccttaggagtgtgattatcctgttctcctgccttgtgggggagatcagtgtttctcttatttaagtaataggtaggtcctgtgagtttgtgcaatggtgtcacctacggtatgaatactggaggaacaattgataaactcacatttgggaaagggacccatgtattcattatatctggtgagtcatcccaggtggcaccacgtgcaaccccatgggccagtgtcactaatcctttctctggagatatcacttattactatggtgaggcttgctgtagatgttgtaactaattttcttacagaggtctgggaagggaaaagcattactatctatcttgaatattcatgtttctctaggtcaaacacattaaaatttgactttaatcattcaatgggtattgtaaaatgccttctatgtgactatcactctataaaatgttagactgagtatgaagtgtgagatagattcctgtcctgtcctcaagtggtataaaaactagacaaaggtactgaactattgtaaattaagcagccagaaaactattttagtattgaccagttgatgatgtcaatggacacaatagagattcagaggggatagggtgctggctgagaagttggcctagactgagaagtttcctgtggtacaaaggattcattgagccctgaaggatggataagatctgtatgggcagagaaaggagagaagggaagttctgggcgtagggaacgacaagaaagaaggcatgatcttgggaataatcaaggcacatgcaaagtagcctaagtatacatctgataataaaattggttgaaaagtagtcagagaagatgtctttttaggcatggaaaaaggaaatactagagcattcaacagaatacagaaattagggccagggccagccattgggaaactgagaatccgatttagagatgcagactagaagtgaaggtgagagcagccagctatggtgccgcagacctcccctctccttcctcagtgggctctgagaggggtcatcccacaccttagaggaggagaaacctaagggattctgtaatagagacacggggcatggtatgaaagtattacctcccagttgcaatttggcaaaggaaccagagtttccacttctccccgtacgtctgcccatgcccacagtttcctgatgctcactaaagcctcggtgggacccagagtgactgtcactaattctgatttctgggtccctagtgcccaaacacgggggacagatttaatggtaaggaagctttcaatcactgctgtgtccctagggatctaaagcactagagcacatgtgcttctgcagttcattttgaatttaaaggacagcttaggatctagaatagctgaatttccacctcaaaacattggttccgtcttgccaagcctaccttctgatatcatcagtgatgggatgtgtttttcttactagggtagaataggatgtctctccccaaaggactctggcagacagacccctaaacacctccaaattaaaagcggcaaagagataaggttgaactagacgtacatggggataaaaagtataaaaggtacatgggaatgaaaggataaaaaggctaaaaaaattaagtacctctaactcagcccctgttgccatttctcagagtcttgtgttctgtggcattgcgctttctagaccaacagtgtccaatagaactttctgtggcaatggaaatgtcctgtcaatctgcactgtcccatacaatagccaccagctacatgtggctattgagctcttgaaatgaagtttccatttttaattgaaaacattttatttcacattgactaatttttatttcaacagccacatgtagctagagactattataccagacagagcagcctagatcttctccagtctgacacccaccagccccaggacttgagtgagtgtttaaccaggactcaaagttgggtttctgccccacaaggccaccccctttcctctttaaagccaacctgcatctggtggcccctgatcccctgccttgaggatcggcacttccagactcctctccccctctgcagtgctgtccagtacccccactgatgactaacaatcagggggatgtgttggtagagctaatggctttctgtctgtcccttcccagcaaaggaactatgccttagggccttcacccagagtgatgtcaggctgcccaagcatgaggagggaagtaggcagaatcctctggagccaaagctctggatgtctctcccctctgaccatggagcccacccctgctccactgctccagggacagccctatgctgcaggcagctctgcccccactcagcatcccaggggctgatttctttggttttggatccagctggatgtctgcattgccgaggccaccagggctggctcagcaactgtcggggaatcaccagggtctgagaaatcttgtgcgcatgtgaggggctgtgggagcagagaaccactgggtgggaaattctaatccccaccctgctggaaactctctgggtggccccaacatgctaatcctccggcaaacctctgtttcctcctcaaaaggcaggaggtcggaaagaataaacaatgagagtcacattaaaaacacaaaatcctacggaaatactgaagaatgagtctcagcactaaggaaaagcctccagcagctcctgctttctgagggtgaaggatagacgctgtggctctgcatgactcactagcactctatcacggccatattctggcagggtcagtggctccaactaacatttgtttggtactttacagtttattaaatagatgtttatatggagaagctctcatttctttctcagaagagcctggctaggaaggtggatgaggcaccatattcattttgcaggtgaaattcctgagatgtaaggagctgctgtgacttgctcaaggccttatatcgagtaaacggtagtgctggggcttagacgcaggtgttctgatttatagttcaaaacctctatcaatgagagagcaatctcctggtaatgtgatagatttcccaacttaatgccaacataccataaacctcccattctgctaatgcccagcctaagttggggagaccactccagattccaagatgtacagtttgctttgctgggcctttttcccatgcctgcctttactctgccagagttatattgctggggttttgaagaagatcctattaaataaaagaataagcagtattattaagtagccctgcatttcaggtttccttgagtggcaggccaggcctggccgtgaacgttcactgaaatcatggcctcttggccaagattgatagcttgtgcctgtccctgagtcccagtccatcacgagcagctggtttctaagatgctatttcccgtataaagcatgagaccgtgacttgccagccccacagagccccgcccttgtccatcactggcatctggactccagcctgggttggggcaaagagggaaatgagatcatgtcctaaccctgatcctcttgtcccacagatatccagaaccctgaccctgccgtgtaccagctgagagactctaaatccagtgacaagtctgtctgcctattcaccgattttgattctcaaacaaatgtgtcacaaagtaaggattctgatgtgtatatcacagacaaaactgtgctagacatgaggtctatggacttcaagagcaacagtgctgtggcctggagcaacaaatctgactttgcatgtgcaaacgccttcaacaacagcattattccagaagacaccttcttccccagcccaggtaagggcagctttggtgccttcgcaggctgtttccttgcttcaggaatggccaggttctgcccagagctctggtcaatgatgtctaaaactcctctgattggtggtctcggccttatccattgccaccaaaaccctctttttactaagaaacagtgagccttgttctggcagtccagagaatgacacgggaaaaaagcagatgaagagaaggtggcaggagagggcacgtggcccagcctcagtctctccaactgagttcctgcctgcctgcctttgctcagactgtttgccccttactgctcttctaggcctcattctaagccccttctccaagttgcctctccttatttctccctgtctgccaaaaaatctttcccagctcactaagtcagtctcacgcagtcactcattaacccaccaatcactgattgtgccggcacatgaatgcaccaggtgttgaagtggaggaattaaaaagtcagatgaggggtgtgcccagaggaagcaccattctagttgggggagcccatctgtcagctgggaaaagtccaaataacttcagattggaatgtgttttaactcagggttgagaaaacagctaccttcaggacaaaagtcagggaagggctctctgaagaaatgctacttgaagataccagccctaccaagggcagggagaggaccctatagaggcctgggacaggagctcaatgagaaaggagaagagcagcaggcatgagttgaatgaaggaggcagggccgggtcacagggccttctaggccatgagagggtagacagtattctaaggacgccagaaagctgttgatcggcttcaagcaggggagggacacctaatttgcttttcttttttttttttttttttttttttttttttgagatggagttttgctcttgttgcccaggctggagtgcaatggtgcatcttggctcactgcaacctccgcctcccaggttcaagtgattctcctgcctcagcctcccgagtagctgagattacaggcacccgccaccatgcctggctaattttttgtatttttagtagagacagggtttcactatgttggccaggctggtctcgaactcctgacctcaggtgatccacccgcttcagcctcccaaagtgctgggattacaggcgtgagccaccacacccggcctgcttttcttaaagatcaatctgagtgctgtacggagagtgggttgtaagccaagagtagaagcagaaagggagcagttgcagcagagagatgatggaggcctgggcagggtggtggcagggaggtaaccaacaccattcaggtttcaaaggtagaaccatgcagggatgagaaagcaaagaggggatcaaggaaggcagctggattttggcctgagcagctgagtcaatgatagtgccgtttactaagaagaaaccaaggaaaaaatttggggtgcagggatcaaaactttttggaacatatgaaagtacgtgtttatactctttatggcccttgtcactatgtatgcctcgctgcctccattggactctagaatgaagccaggcaagagcagggtctatgtgtgatggcacatgtggccagggtcatgcaacatgtactttgtacaaacagtgtatattgagtaaatagaaatggtgtccaggagccgaggtatcggtcctgccagggccaggggctctccctagcaggtgctcatatgctgtaagttccctccagatctctccacaaggaggcatggaaaggctgtagttgttcacctgcccaagaactaggaggtctggggtgggagagtcagcctgctctggatgctgaaagaatgtctgtttttccttttagaaagttcctgtgatgtcaagctggtcgagaaaagctttgaaacaggtaagacaggggtctagcctgggtttgcacaggattgcggaagtgatgaacccgcaataaccctgcctggatgagggagtgggaagaaattagtagatgtgggaatgaatgatgaggaatggaaacagcggttcaagacctgcccagagctgggtggggtctctcctgaatccctctcaccatctctgactttccattctaagcactttgaggatgagtttctagcttcaatagaccaaggactctctcctaggcctctgtattcctttcaacagctccactgtcaagagagccagagagagcttctgggtggcccagctgtgaaatttctgagtcccttagggatagccctaaacgaaccagatcatcctgaggacagccaagaggttttgccttctttcaagacaagcaacagtactcacataggctgtgggcaatggtcctgtctctcaagaatcccctgccactcctcacacccaccctgggcccatattcatttccatttgagttgttcttattgagtcatccttcctgtggtagcggaactcactaaggggcccatctggacccgaggtattgtgatgataaattctgagcacctaccccatccccagaagggctcagaaataaaataagagccaagtctagtcggtgtttcctgtcttgaaacacaatactgttggccctggaagaatgcacagaatctgtttgtaaggggatatgcacagaagctgcaagggacaggaggtgcaggagctgcaggcctcccccacccagcctgctctgccttggggaaaaccgtgggtgtgtcctgcaggccatgcaggcctgggacatgcaagcccataaccgctgtggcctcttggttttacagatacgaacctaaactttcaaaacctgtcagtgattgggttccgaatcctcctcctgaaagtggccgggtttaatctgctcatgacgctgcggctgtggtccagctgaggtgaggggccttgaagctgggagtggggtttagggacgcgggtctctgggtgcatcctaagctctgagagcaaacctccctgcagggtcttgcttttaagtccaaagcctgagcccaccaaactctcctacttcttcctgttacaaattcctcttgtgcaataataatggcctgaaacgctgtaaaatatcctcatttcagccgcctcagttgcacttctcccctatgaggtaggaagaacagttgtttagaaacgaagaaactgaggccccacagctaatgagtggaggaagagagacacttgtgtacaccacatgccttgtgttgtacttctctcaccgtgtaacctcctcatgtcctctctccccagtacggctctcttagctcagtagaaagaagacattacactcatattacaccccaatcctggctagagtctccgcaccctcctcccccagggtccccagtcgtcttgctgacaactgcatcctgttccatcaccatcaaaaaaaaactccaggctgggtgcgggggctcacacctgtaatcccagcactttgggaggcagaggcaggaggagcacaggagctggagaccagcctgggcaacacagggagaccccgcctctacaaaaagtgaaaaaattaaccaggtgtggtgctgcacacctgtagtcccagctacttaagaggctgagatgggaggatcgcttgagccctggaatgttgaggctacaatgagctgtgattgcgtcactgcactccagcctggaagacaaagcaagatcctgtctcaaataataaaaaaaataagaactccagggtacatttgctcctagaactctaccacatagccccaaacagagccatcaccatcacatccctaacagtcctgggtcttcctcagtgtccagcctgacttctgttcttcctcattccagatctgcaagattgtaagacagcctgtgctccctcgctccttcctctgcattgcccctcttctccctctccaaacagagggaactctcctacccccaaggaggtgaaagctgctaccacctctgtgcccccccggcaatgccaccaactggatcctacccgaatttatgattaagattgctgaagagctgccaaacactgctgccaccccctctgttcccttattgctgcttgtcactgcctgacattcacggcagaggcaaggctgctgcagcctcccctggctgtgcacattccctcctgctccccagagactgcctccgccatcccacagatgatggatcttcagtgggttctcttgggctctaggtcctgcagaatgttgtgaggggtttatttttttttaatagtgttcataaagaaatacatagtattcttcttctcaagacgtggggggaaattatctcattatcgaggccctgctatgctgtgtatctgggcgtgttgtatgtcctgctgccgatgccttc

SEQ ID NO: 58 - DNA, 575784 bp, Homo sapiens
atgggctgaagtctccactgtggtgtggtccattgtctcaggtgagtcctgggcacaggtgggacatttctgtccttaaattttttgcttttttcatggaactgcttcagaagattctgtcctaggcttagtctgaatttggcttcttattttcataggctccatggatactggaattacccagacaccaaaatacctggtcacagcaatggggagtaaaaggacaatgaaacgtgagcatctgggacatgattctatgtattggtacagacagaaagctaagaaatccctggagttcatgttttactacaactgtaaggaattcattgaaaacaagactgtgccaaatcacttcacacctgaatgccctgacagctctcgcttataccttcatgtggtcgcactgcagcaagaagactcagctgcgtatctctgcaccagcagccaagacacagccctgcagagtcaccgcctccctgtgcacaaacctcctggatctaatcagaaaaccgtgggggcaacgcatccagctgagcctcagcactcggttcagcattctgtaagacctcagcagacatctcagatcataatactgtcatttattggatgtggcaatgctaaattgcccagactcctgcagcctgtggcctgagtttgtcttgaatgagactgtgcctgaacttgaatgtaggacagatgccgtcaagtttaagtttttccaagtatctttcagtcggtttgtgcctctgggaaatgttgtgtgaggtatttaacactctggcctcaccaatccaccttccaatatggactgttttttgactttcttttgactcaagttagacccggatctcagccctcatcccagctccaaatatgtatggtcagaccttttcttttcttttcctttctttttttttttttttcttttctttccctcccttcctccctccctccctcctttctttctctctctctctctctttctttctttctttctttctttctttctttctttctttgtttctttgtttctttctttccttctttcttttttgagacagagtctcactgtctggagtgcagtggcgcgatcttggctcacttccacctccatcttccagattcaagcgattctcctgcctcagcctcccgggtagctggaactacaggcgcccagcaccacgactggctaatttttgtatttttagtagagacagggtttcaccatgttggccaggatggtctcaatctcttaacttcttgatttgcccccctcgggctcccaaagtgctgggattacaggcgtgagccaccgcgcccggcaggtccttttctttttctttctttcttttttttttgaaaaactaaagaatacccaatcccctcctcaggtggctctatcactgcctcaccctgaggacagtatttccccatggggtttggatcactgttctctagttccctctccctggggcatgtgcagagtttcaacttcttgttggctgctctcttccactcaggatttaaaacattcacacttgattctttttccttctatctctgtaatcctaataccaagttttcttggcattcattatcagccgtggaatctgttgtacctgaattgttactcacagcaggtaataagagaacaagacctcctggaatttctgagccagactttgtactcagggttaccttgctgacccccatattttccagcattgctcttattaattaatggccctcagtcctgcacacaccatcagatcccaggggctgagcacagcctgcattgtcaggttctgcaacaacacaaaggctccctcctctctcctatagagggcgctccagggatggtgggtgttgccagagacaccagtaattctgccagaccttgcctgtggggccatgggagctcaaaatgcccctcctttcctccacaggaccagatgcctgagctaggaaaggcctcattcctgctgtgatcctgccatggatacctggctcgtatgctgggcaatttttagtctcttgaaagcaggtcgatgcttagactctaggaaattcttgctttgaacttacctaagacaattctaaaccattctcttaatcttcttcttttctcacaggactcacagaacctgaagtcacccagactcccagccatcaggtcacacagatgggacaggaagtgatcttgcgctgtgtccccatctctaatcacttatacttctattggtacagacaaatcttggggcagaaagtcgagtttctggtttccttttataataatgaaatctcagagaagtctgaaatattcgatgatcaattctcagttgaaaggcctgatggatcaaatttcactctgaagatccggtccacaaagctggaggactcagccatgtacttctgtgccagcagtgaagccacagccttgcaaagacaactccagcctgtgcaaaatccctcacagagctgcctccctcccagccgccagctcccacttcctgcctaagaaaaggaagtctctggttgggtttgttcttgcagctgtctccaaatagacagatatctgaaattaaattaccaaaggtatcttgggcagaaatgaccagacactgtaggatttgaagaatgtttacagatactacagagtgtgagtgtgatggtgggctctgaatatgagagaattgtacacaaccaagtaacttatatcttctcctcattcccatttggccatctttattagaattgttttgttttagttgcttaggaaaacatattttaacttctagggtggcgagatgattcctgagtgggagttcaggtatttccatgagaatatagagggtgctcacagaaatcttcagaagaaggggcttggtacaaagaactcaattatcaatgactcttgctcagcatgtggtcaagagcagaactatctgatgaccctgtgaacctggtgtgatgcatttgggctaatgatgctagctcacaaaataacaagttaagagagtagaaaacatggagtctaatatttcacaccatttcaaggtcaacagagttctagaccagcatgagaatcgccagaataaagcaaggcagtgcaggaacagaattcagcagcaaaagtcaagagacacctagaggcagaggcaggaatgaatttgtcactttcaacttaacctgaagcagccagattaacttcttgagtttcatttaagaaattattcctcttttaaacatacctattgaagtctaaattttaggtattttatatatttcagttctggaatttccatttaaatcttgctacaatttccagttgtttgctaaaattgcacattttgtcatttactttgttgactatattaacatctgtcattttaaagccactttttgataactttaacatctgaatctgtttgggtctatttcttttgtctgttttctctgttcagtttctgggcacgtgattttgttttctcatacaactagtaatttacttgaatgccggatattgtatataaaaactatagagataatttgaggctctgaatgatttcatcttcctcaaatgattcacttttgcttctgctgggattgtagcaggggcggatcaccttaattgagctgatgaatgagctggatcagacctgagcttcagcctgcatgatggctgctcgcctttgctcttagccatgtaagttccaactagatgtctgaagtttaacagctaaatcaaattgtaaattacataacataatatttgcccattgcaagcatgcaattcaatgaattttgataaatttgtggagttgtgcaacaatcaccatgatccagctctaaaacatttcatctttccccacccggaaagttccttcgtgctcattttcagtcaatccctgcttctacccccagcaccaaggactggggtctttgccaggctcctctcctattcagtagtcactgaacgtaaatgttctccagaccagaaaggtggtggatgctcctcaaagcctgctacactctcagtcttcccttttcttctcagctacttagccaacgatataaaactggcaaatgacttaaggcgaaagtggtctgttagatctctcctttctcgttgagatcccaatcccttaagttcttactgcctcagtagctccaagtgccttcaaacgtttatttttatattttgttaagtttttctagttgtttttggtgggagtgttgttctgcaaaaaatcagtctattaactctgaaagccagtttctatatttattaaaggtgaggtgcaatgttttatgtttttattttaggtagaagtatcttgaagaaaggaaggagtgaacctctctgccttcccttttttttttctttttgagacagattctcactctgtcacccaggctggagtgcagtggggcgatctcagctcactgtaacctctgcctccggggttcaagcgattctcctgcctcagcctccggagtagctgggattacaggcgtgcaccaccacacccagctaatttttgtatttttagtagagatggggtttcaccatgttggccaggatagtcttggcctcttgacctcatgattcgcccgcctcggcctcccaaagtgttgggattacaggcatgagcctccattcccggccagattatctctatttctaagagttctattagccttctgcctttggtccaccatgggacagagtcttgacacgtttgaccttttaccacaaggaggagctgtgactctactgagattaagggaactcagaggaagggcagagcattctcaggatgggagacagttaaaagaaatattgggtttatttacaacaggggaaaatgtggtctgcagaagctgtgttaatgctgaaatgtgagaggataaatatagactattcatttgccttgctgtgcaggtgcttttgatctagcaaagagcctagactgccagatttgttgcatgtgaacctgcatgggatgagaaagggagagaatttgagctgggaaagagcagagctcacaagcagatgccagtggaggaactcttcctgagaggaataagagaggctctggatgctgggcctcttctccagttcaatcctgccatgaaatgacttcctggaacctgggcagtgagcctgacaaatcagggcttccttgagggatcttgcaaagagagtaattaccaagggaaatctacctatcagaccaaagaatacctggagcaccattctcctgactctaaatgatgaaaaacctaagctagaaagggtttttttttttctttttcctcttctgaatgttcctctaagttcttggagtgagggcttcttcgaaggataggaaacctgtctcctgggtctgagctaatggttctatcaaaacagcctcaccagactcccttccagcttccagcttcaatatctatccctgtctaccaagacccatggaagctagacttgtccagatatcaaaagatgatgccaaacacctggagatgggaaagaaggtggcgtggacagacctccaggatgcacatctgaaacaggctcttcattttgttttgactacagcctcctgtttcgccttttcaaaaagcatttggaatttcccttacttcttggaaatccaaaaatacagcaaagatacattttctataggctctagttattcagtaggagggagcttcagaatatctctatactctactatgcatattctagcatgctgcccggaagtgaaagtctagccaaacagtttaacaggaaaaccgttagctgtcctgtggaggttaattttgcagtttattttggaatggaacaaaagaaggtattgaagataggaatctcatttctatatgctagaatctaaatttcttaactttctgtagtatgggccattttcaaatcagctaaagtcctaaaaccagactatgggaaacacacacttctaagctcaatattaaatatctaaagtgactaactaacgtagggttggagaggcagggtccccctggacttttcaaactcctaccctcacaaaaaatctagaacttcttctcagtaacaaaaataagatgacgtataatcatttttcattgttaataaataatctctatccatcatggcattgcattgaatttgtgttaattgttgctaaaaaatgactgtgggttaaacatttgtgattcatataataatagaaataataaatgtaaatgttttaagtgaacaagtgagattttaatagctcaacaggcaaatagcatgaactgatgctctgcaaaggtgagggacacctggcctgagacaggatgtcttatctgattttggtctgaatttcatttggaaaactggcagctgctggtcaacctgcagggatatgatcccatgagctgatatgcaatgttgacttttgtatttttgtcagcatgaaataatttttttttttttaaatcagggtcagagtctcgagtaactagcagccagctgatagaatggaagtgaaaccatggccctcgtccccttgcaaacctggaaacccagtgttgagcatgtgtgaagagagaaacagaatcaggtgaaatgaaatcttcctaagaccctgctcaggaaactaaatttgacgtaattggacacaagaagttgttcatccattctattccgccagaggagacaggacagatttcccgtgcgttcttgggaagctggaagagggagacagctctgccaggtggagtgatattctcatgagaagtgaaaaagaagaggcagagatggagagtttggttctagaagggtggaaggttttgcttataaacatatcaacacacttgcttttcccgccaagatgcaaactttggggaattgctcaaatataagatggggtttaaatattggacagccaaaaatatgacccatgttcaaaatatgcatcctggtatcattcagttcgacgtgttctagttcttctgcagctttctgtctcattccttttgcccctacaactctccacctttttgtggattaagttatctccatgataaaattattatgttgtcttccctctttgactttcttgtcggcagcctggctcttcccagggatcccagcgtctatcctctctcctttctgtagcttttttccgcttctccagtatggcgggccctgtcagaaaatacgtacataatcaatttatttgtccttcttatcctttggacaattcttttgtttgtttgtttgtttgtttttggttgagaccaagtctcgctctgtagtccaggctggagtgcagaggcaggatctcggctcactgcaagctccgcctcccggcttcaggcctgcctccgccttcctagtagctgggactacaggcgcccgctccacgcccagctaattttttttttttttgtatttttagtagagacgggtttccccgttttagccaggatggtctcgatctcctgacctcgtgatccgcccaccttggcctcccaaagtgttgggtttacaggcgtgagccactgcacccggtctagacaattcttgatggacaatcaaacacttttgcttttcatatctcctgtaaaacacaaaacaaaacaacaaccagaactaacattgcctcatatgaggcgagtttctttctatcagtttcattccagtgcctctcccagacgctgtccgtctgatttggtaaaaagtcttgcgtaaaatagtgaaatacatatttatttaaagtctactctttaagaatggttacatctttacatagttatgatcatcaccattgaatgtagcctcttgtcatttcactatcttccctccccacccgttccttctttgaaaaggttcccatgtcagctgtgtggtgcaatgtggtaggtactgaataagacccacaactacgggggtacctggttatgttcacagaattgtagagctagacagagtgttgaaaattatttatttctgcccattgtttcatagatcaggaaatgggatgctttaaaaaaagtatttaaatgtaaatagtaactattttgctggcctccatgtaatatgtatttcatattcttagtctacaagtaatgtgtgaatgtgtttttgctcctattggattataagcatcatgagagtgagaatattgtttactcatgctttgcactaagtagccattcagtgactataaacaaataaagcatgcttgaagttccaagaaggatggtggtcatttttcttttgtttagttcaagttctgtgtttagtaaatcacaaatgaaccatcaaggtctgtctttgcaggggattcaccagtagatgacaacactaccaaagtgtgtgtgtgtgtgtgtgtgtgtgtgtgtgtgtgtgtgtgatacctttctggcagtgctggtctctggttttcctcctggaggttcctgccctggggccattgactgaggcactgaggtctgagtgctggaccttgctgacaagagcaggaggagctgcagccctgccacacccccgaggttgggtggttgatggctggcagaggagaggagtaccatgggcaagaataaaggggactgtggtcctcaacattagataattcacaaaacgcgaaggcattttctgtcgtcacattgccatcaggtgggtagggcccaaggatgccgccaagcatcctccctacacaggacagctccccacaacaaacaatcacctgatccaacatggcagtagtgctgaaattgagaaaccccgcaataagcttcggttgtaaactttgtaccaagaaggagaattctctgcagacaactcaaggggcaataccgtcaactacttttgttttctctgactgccgtgttgttgaccttcatcgccattctttcccagcacatggtgtctgcatattttccagcagcctcctgtttcctcataaatctgccccttggacagataagaacatcacagggagcagggctgcagttcactcccaataataacgcctcagcagggtttgctctgcagtagcatcacagtcatgtggagtaggtggctatggctggtattcaggtgaaatctcaggccaatctctcctgaatcaaggggaccactgatcattaatgagaccttcaagtgagcaaagattcaagagagcaaattaatgtcctgcgctattgtgaagggacgcaaaggatccagagaggaaaccagctgactctgagagaagggcctgaaaaggagaggaagggaggaggtggtcagatccccgggaaggagcagggagggagggggctgctggcccaggaatgactgtcagagacacatcctggaggtcacaattccaccctctcaattattcccagaaattccaaaaactcctttaaaggagcaagtgcagggcatgaaagggaggagccatgctagaggagaccctgggaatgggggaatgattacaggctgtgacctcactggcgcagcacctctcagcggcagtggaaaccacagcctagtcctctcaccactgcagaccagaatcctgccctgggccttgcctggtctgcctcactctgccatgggctgcaggctcctctgctgtgtggtcttctgcctcctccaagcaggtgagtcccgggcccaggtgacatgatcctattggagtccctaagccttttcaccatgacaacaacagcaggccgtctcctaggatttgcctgaattctgcttctttcctttgcaggtcccttggacacagctgtttcccagactccaaaatacctggtcacacagatgggaaacgacaagtccattaaatgtgaacaaaatctgggccatgatactatgtattggtataaacaggactctaagaaatttctgaagataatgtttagctacaataataaggagctcattataaatgaaacagttccaaatcgcttctcacctaaatctccagacaaagctcacttaaatcttcacatcaattccctggagcttggtgactctgctgtgtatttctgtgccagcagccaagacacagccctgcaaagtcactgcatccctgtgcacaaacctcccggctcagccaggaagctgcagggcagcgtgtgcacctgcacccagggctccagtctccattccctgatggcctctgatggagtttcagtctgtagtacagccagctagtgcacccagtggagaagtcctccatcttatgcacacaaaagtctcacagaattgtttatcagctagagcagggcttcacaacaaagccactaaagtattagggctccacaaacaaaaaagagcctgtcctatgcactgatgatcttaactgatgggggaagctctttcttttctttctgtgtggcacatattggtacgtattttatataacattatgaaaaaaacacgattgctgaaaatggttgatgagcacaagcataaaggagggggaaggaaatatttccaagatcaagagacaattctgatgatcagtgagtactttattcaacagaaaaatatttggagaggcatgaaattccatggcaataggtaaactggaaagtgttgaggagatgccggtggaggtagccttgtgcgttgtgggctccttctcttcaagaagggtgaccagcaagtgtctctcccaattctgatgaatatcatcttgaactgtcctcaacagcaggcaatagccagatgactggggatattgggagacctgaaaggactttggacacaaatctctaggcagtggtgagccattggtcctactccaagtgaaacaacatgatgaaactgatattttggtagaggaacactggtagtagtatggatcagaaaggagatagatttttgggtggcatgaatgattaggagacttctaaatatcctacatgaaagattagaaagggttgatgtgaagcattgtggacaatataggcttgaggctctgcattatgttatttcttggaaatgtattgggttttattctgggagggttgaatgtaggacttgctagggtctatttcagccttgccctccctcttagggagccccagcatgtggtcatcattgctagtgcatggcctttccagggtcttagtgggaatcacagtcacccaccacgactctccactctcactgggtctgaatgccattgccttcctgccctgggtatcctctgaaatccctgcccgtgtctacagccttccagagtttgttctctgctgggccttcgggagtgccaccctctgcatacacaacttaggacctggcccagaaagaaaaataaaaaatgaaaaaagattttcttacacaggttctcagggctccttggtagtactctgtgtcctaaatcccagctgtcttggagtcagttatgtcctcttatcttcaatcacatatactacttctattttatataaatatgtttacttggcttttcttcatatttaccattccactcttcactcttcttgcaattcacatggtcctgagatcattttccttcttagatccatccctaattcagaccacttgaactcgctggtcaccaccccttgttgtgggaaatgcttatgttagctgttgtcctcaggacaattaaacctttcgctttcaccattattcaagttttcagtttaaattctattgctttttttaaattgtctttgcaatttggtttacttattgagagccaaacaatgcaataaaattttattcgttcaaatttgttctactttgtagaagggccaaagtgttttcttgctgaagtagataccaatggaaacaattttaatggtaataatactagtgtttaaaataaggctaattttaggtttttatctagtgaatagaatatctccaactgtagcaggatagagatcgatcctatatgtaacctgttgagggggagaatactcaaccccattaaattctaatctacatgctttacattttttgtttgtttgttttatgggccacattgaaaatctgatgaaatttttgcattagaagaatgctacaattttcctcctgactgagaacatccccaggttaaaacaaatctaaattataaatccttgacttaaatcatggataagtatcttccctcagccccatgtagatttacatataacatagatttacgaccctaatctcatgcctacaattataattatcatcatgaaaaggtaacactgatgtaatacaacaataaatagatggtaaaaatcactttgaaagtatgaatcatctcatttttgtgtttatttgtgttcatttgtatctccaaatgctctagaatgaaaagccaatattggcataaaagtaccttttaagaaaattgatgatattccaattcttaactggtcacaaagcataaatagcttatgcagtgaagtacagaagacccataggaagtcatccagctggttcctagttggaaagttctccacagaactgatgaactaatgtggtttctaacatcttagaaatggcagggctttagagatcatctcatttcagttctcctgatttaatatatgaggaaatatggcatcacatatatgaagtgattgaacaatgacatactgattacatttctcaaactttatgtaagatatatttttattctctagttgttttctgaatatgttgaattgccttacacaaatagaattctgggggtgaaaatgttggtgattttctgcttgctcctagctgttgctcaaggagtatttgttgaacaagtcagactggcccaagaactcaagagggctgggatactgtctgttctgcacattactagagatccaggcatagacaattttctgttcttttttcttttctttatttcatttcatttcatttcttttccttttttttttttcttttgaggtgtgtggtgggagcagggtcttgctctgtctggagtgcattgacacaatcatggctcactacagccttgacttccatggctcaagcaatcctcccacttcagcctcttgaatagctgggactacacacaggcaccactacattccgctaatttttgtagagataaggtgttgccatggtgcccagacacagacatagacaatttctgttgagtaaaaatttagaatgtcttatgtgtgtggatacctggcgttctggctgctgactctctgtgttgttgccaacacctccttcgtcttcattctcccctggcctttcaaacccttctctgctgctcagggttgtgagatgtggaacccatctggatgctgacactgggtcggtgagtggccaaatactgttttggccacaggcaggagctgtgctctggtgaaacctctaaggcagggacctggggaagggatagagaataagaggagagatgggccaggagggatcttgcccatggggagccaaccgtgcctcaactgagagcatggctgtactcagcccaagcacactaacatcagcttcaagctgatttccctttcctttgctccacacaccttgtgttgttctttttcagcatcctgtgtatgttagctctaagcccagccaagccccatgccctccacttcagggacagagggtggctcatcccttttgtgctccctcagctccctccccagtgcctggtggctggttggcaacacagtcatgcccttgaatgatgggagctggtgcacactgcatccgtgttcatgcagtcaccctccctccacagagccgggcagaaagggctccaccacacttagacattgagggaagggacgttttgaatggcactgttttatgtgatcccgcaggacagaaggagatttcttgaatgggagtggtctgttgttgagagggatcctgaaagacagggagacaaagatagagggaggatccacataattaggaagcagctgagagcaaaggagcccctgccagaggaatatccttggggggtaaaaagccagctctgccctttctccccagccgattcatcctagcccagcaaattcaaatctaccttctatcagaacttagaaaggatgtaaagcagtcaggaagaaacatcccctgggtctggggaaactatcaggagcagtgacatcacaagaaaaaccaccaaccagggccaaggagaccagagcccagcacctcgcccaaaggaccccagtcagaggccccatctcagacccgaggctagcatgggctgcaggctgctctgctgtgcggttctctgtctcctgggagcaggtgagttaggttgaaattgtctgtccttggactccaacccttttccttgtggctgcaggaacaaccctcttcctgggctctgcctgaattttgtccctttcctcctacagttcccatagacactgaagttacccagacaccaaaacacctggtcatgggaatgacaaataagaagtctttgaaatgtgaacaacatatggggcacagggctatgtattggtacaagcagaaagctaagaagccaccggagctcatgtttgtctacagctatgagaaactctctataaatgaaagtgtgccaagtcgcttctcacctgaatgccccaacagctctctcttaaaccttcacctacacgccctgcagccagaagactcagccctgtatctctgcgccagcagccaagacacagccttgcagagtcaccgctttcctgtgcagaaaccttcggggcctgccaggaagccgtgggggccacggagggctcgggtgaacatttcctccaagagccccgaagaagcttcagaacatcatagcacctgctaattcatccatgtggcaactttacatcctatgacatatttagagtgtgggtttccttttgcctgagtgtgactctgccccgtcaactgatttgaaaaaagagaaacatattcagatctagtttaaaaaaaaaaaattttttaatcatgaaataggccgggcatggcggctcatgcttgtaatcccagcactttgggaggccaagacgagcggatcatgaggtcaggagtttgagaccagcctggccaacatggtgaaaccccgtctctactaaaaatacaaaaatcagctgggtgtggtggcatatgcctgtaatcccagctactcaggaggcaggagaatcacttgaactcgggaggtggaggttgcggtgagccgagaccgtgacattgcactccagcctgggcgacagagtgagattctgtctcaaaaaaaaaaaaaattcctgaaataaagcaagcatgctgtaaggattgtgtagcttaaaattttataagaaccctctaaacaatcacctgtgtcaccacagaggcacaccctgcactgggtcagacactgtcctgtgaggagctgtgttctcctgacacttcatgtccagtggtttccatgactcttctttggggccaagggttccctttcatcataggttgttgtcatgcagagtcaagcaacactgagcactgggaaatcagagaaggaacttccaggcaagggtcccagtgcagaagccagctagagaggacagtagtagactcaccctttgggaaatatgtttgagaaatatgtatctattttcaccagttctattactctatattacagcttgtctattctctaatttctcatttgtacactgaaagctagactgtgaattctagccctgatcaaagctccacatatacacagacaccttctctgaaccctgcaggcagcaaacttgcctctgtctgctccccttgctgcagagtccatggatcatggtctagaagtttcctgactcatccactctccttctcttggctggaagcctccttgttggtttcagatctcagcgcctccctggattgcctctccagactgacacttgaaggattatttttccccctttggtctctttattcccaatgtgttcaatcatcaggctcagagcctgatgcctccagagcgcagctctacattagcttttagagaggagagtgggtcctggctgttctgtttatctgttttcattcactaattcattcattcatttattatagagacaaaagattccctatcccaagatatatggtcatctgtgctgtatcaaaagagaagatattcttctcacagttttatgaaatgaggtagcttcgcaacttgcggggagcagcctcttaagttagttgtcaaaattaggcttttgcctaagtaaagttaggatcctaaattaggctcctactctcccacaaaaactgggagacagggcctctatcttccttgacgattgtatctcaaaaagatggttcctagagtcttgggaaagacattcctgggtcataaagctggctagaggtttacagagattttaataggattgtcaaaaagccttttctgtgtttattgagatgatcatctgggtttgtttttagttctgtctatgtggtgaatcacatttgttgatttgtgtatgttgaaccaaccttgcatcccaggaatgaagcctacttgattgcagtagataaactttctgatgtgctgctggatacagcttgccagtattttgttaaaaatttttgcatcgaattaaataatttttaaataaggtgacttacattaattgctttttaaatataaaaccaattatgcattcctggggcaaatctcatctactgattagatattaacctttttatacattgtgagttaaatttactttatttttgttaaggatttttgcttctatgttaatattagtactatttattcttcacaatttgtaaattgataaacttgctcaatttcatcaataaagtaagctgggcctggagttttctttctggaaatgcttttaattattatgagttcaatttttaaaaccacttctacatgtattttttaatatccctatggacattcaagttatccactttttgagtgggtaattgtgttttttggggaatttgtttattttgtctgcttttgaatttattggcataatattaatctttcattggagttctaatttgcatttctctaaggattaatgatgttgaggacattttaatgtttttattaccatttgcagatatgtctttttcatatacctattaatgcttttgcccagttttaaaggttaaattatatatcttttatattgatttataggaatcctttataaaatataaaggatttttatattatatagaatcctttatataatctggatacaatattctagtctgatatatgtattgtgaaactttttcctcagtctgaaaattttcctttccactttcttggtagtacctgggcacaacccctatgaaatgagagtacccttctgtctcctttaattttgtctctctaccttcacccttatcagtatttggcaggcaattaattcagtcagattgagagagtgcaaaggcttctagctagccctcacaacactggcttgggtacacctctaatctccaatcacacgaaacaatttgccagcccagaagctacccctgctatgtattctaccatgagtagaccttaaatgtgcacctcccactctctccatagtacatatggtagaatggtgatggatccttcttttggcagactttccacaatgcatggagctatgcctatccaagcacatctctgcatggacaaaggaaggggtggataattgagtcagtgtttctgcttcttgcttgtgagttttccccagtaaatcttgttttatgtgtatattgcacagggctagtgctgtctacatgtcccttcatatgatggtgctctcacagaattctgaggctggaaggaacaaacaaaagttctcataaagagaaatttaatcacctctagaaagaagtccgtgcttaatggctttggagtttctgtgaagaaagggtttcctcctgccttagaaggtgggcaaagtgagcaacatcttcaccaagtcaggaacacttgatttcagccagaggcagaagtggggttctatgataatgcccgattgtggttacagagggactacatgagcaaggccatggaggtgaaaatggattcatttgggctgaaatcctgtaaatgaagtaagcgggaaaacccagcgcacattccaatggaagatgcagcttcctaatattgtgctttcaacttagattctgtcatctgtaattactccacacactttctcaaatcattagcacaactgtgggccaggtaatcatttagcccctttgcttggtacaaggtagccatgctctctacttagctccctatttttctctgggaagcttttgctgagacctgcagtgaccatgcttctcagacttctctctttcttattgtcatttccatttatattttaactttaattgtagtttatttgattaacatctgacatgtttatgtttctcttttgcttatttgacctcacttaatgataacccaggtaactggtcagctgctgctaatcaagttatattttctggggttacattggttattttttcctctaaagtttctatctgtgtaagaattgaggtagcagaaccttctctctcttttttttttttgagacagagtcttgctctgttgcccaggctggagtgcagtggtgcgatctcgactcactgcaagcttcgcctcccgggttcacaccattctcctgcctcagcctcctgagtagctgggaaccttctcttttttggaaacagggtctcactctgtcacccaagctggagtacagtgatgcaatcatggctcactgcagcctcaacctctgagattcaagcaatcctcccacctcagcctcccaagtagctgtgactacaggcacacaccaccaccactggctaacttttttgtttacatttttggtagagatgaggtcttgctatgttgccaggtttctctcaaactcttgagctctggtgatcctcccgcctttacctcccaaagttctgagaatacaggtatgagccaccgcgcttagctcctcctattgatttctgaaatttaaatggagatcagactgtctccacgcaaggaggaagtcagacagggcagagcttaaccaatgtccacggtttgttttctcactgcagtcttggacttaccactcatctcttcattctctggctcaaaatagcttcagtcttcccagaagattctcatgattttcagtttgtttctggtttcttagttatttcttgtctcatcaggctcccctgaggaaggagccaggagatgctacaagtctgcaattttagggggagtcagatggagtgcactggtcttttgcacttctttataatattatctaagcctcctcttctttgaaatataatggctattcatcatgggatatgaggcatctcagaagcaatctaaatatctgtttgtttctttttctagtaaagaattgaccagtattctagcaattttattttaggtattcctttaaaagtaaaaaatacatagtttttcttaacgtgacttctattgatagtttatatttttatgattttgtgtagtagctttaccttccctaggatcagaaaccacatcagataatcagcttctattatgaaagaagctgattcttctatttggagagtgaggtatgcagaaaatccataaaaggtattaagttatagaacaccaccatctgatccaccatctgatcttgagagaattttaactggtttatatccatgaatactccctcagtagggtatttttgttctctggatggcatcttggaagaggtactggtcattgatcatatctcactggcacattggctagtgaccgctaatgtcacatgcagctggattggaatctcttctcattgctttctcatggggtcatttgcctttggacttaaaaatcaagaaatttcataatgacaatatctagatttactgtatatatgtaactattcttaaaatttgataacagatatgtcaaatgtagatatttaaagaaatttggattggaaatacactaaatcagaagtagcaagtgaaggatagcggttctgtaatggaatctttctcagattctgttttccctagtctcatgtttcttttttaaacccagtctggcctctccttcttagcttactaagtatagaaccacaaatagaaacttagaaatttaatcattttctgcacatatctttactcatatatgggaaaatgggcaagaggatattgtcagtgaactcaggcaaaaagaggatttctaaaagagagagtatagatgggaaagaaacaaattccccagcagcatgggaacagtgggtactgttttgtttatttttggataagctgattagttggcatgtagcacagagtggtctgaaaggtcttcttggagcaagctggctggagtcatcacagaaaaaagaactttaataataaatcatccacaaatccctgagagtctgcctgccgcaagggagacgggatgacttgatgtgattctggcacagttcttcctgcagcacacctacctgagctaggccaggtttgcatcatctccttcatcagcattttctcaaaggcaacatttcttttctatcacttttttcccttttacagtgcaaaaagtgatcttgaagaacataaattttaaaatgtgggggtttcttttagttcccctagagaaacagtataatagtcaagatggtgaaattgttcctaatttaaatatgtcccatgtctcttgcaccatgttagaaaggctgtatccatcagctcagacagccacagcaaatagcacagactgcatgggttaaatacaaatctttttttttcacaactccagagcatgaaatggggatgccagcatgtggggctctggtgagggccctcctcttggcttgcagagcaccctcttccagttgaatcctcacatggtggagagagaacaagctagccatcaagtgtctcatctcagagggcattaatcatactggatcagggctccacttttataaactcatgtaaacataattttctctataaagaccctattgtcaaatattgtctccctgggggttgtattttggagggacatcaatattcagtccactaacaatggcaaaatcttggttactgcacagtgggccacatgggggtgctgtggaaccactgagctccaaatgtctctggggcatgcacagagccaggagcctgggacagggagggttaaggagcagccttgcttgatgtttgtgctcactaaaaaatgtgatgacggatacataaaactgcaggtgtgcctctcatcagggagccatgcacttcagctatgcctgggttaggaagcctctgtgagccgaagagggagaatgaagatgggatgtcccatgctgggatgggacaacctgcatgtccagggcagggacagatagaggaacaactgcctggaaggaaaagcaaaggaactgtgggggggacatgcagcctaacctcagtccagccccacatggtatgtgagagtattaacagcacaaagcagaggtcctggatcgggtaagccaggggcctaacaaggaaggcaggatgcatgggaacccgcagagatgacatcagagtagtgatatcacagcctaacatccgatcagagatgcaatgcccaaaaccccagctctcagaggaccagtatccctcacagggtgacacctgaccagctctgtcccacctggccatgggctccaggtacctctgatgggaagacctttgtctcttgggaacaagtgaatccttggcacaggtgggatgtctctgaagcacgcctcatccaaggcaccctcaggctccctcctgtgttcttgccctagcctctgtctccctccctcacaggcccagtggattctgctgtgcagaacagagagcagtggacctcaggaggcctgcaaggggaggacataggacagtgacatcacagtatgcccctcccaccaggaaaagcaaggctgagaatttagctctttcccaggaggaccaagccctgagcacagacacagtgctgcctgcccctttgtgccatgggctccaggctgctctgttgggtgctgctttgtctcctgggagcaggtgagtccctgcagacaggatagcgccccattctgagcctgtcctcacccctgtgtcttccactttaccatggggaggcaccaccaggctgtctccggtgctcattctccatctgcttttcccacaggcccagtaaaggctggagtcactcaaactccaagatatctgatcaaaacgagaggacagcaagtgacactgagctgctcccctatctctgggcataggagtgtatcctggtaccaacagaccccaggacagggccttcagttcctctttgaatacttcagtgagacacagagaaacaaaggaaacttccctggtcgattctcagggcgccagttctctaactctcgctctgagatgaatgtgagcaccttggagctgggggactcggccctttatctttgcgccagcagcttggcacagccctacaaagccaaccacattctgtgcacaaacctccctggcccaatgtggagcaacctcagccctgacatatctgtgagaacctggggactgcagggagaaagaaaggcaatttagaatgctaggatccacagcctggggctttctgcaactcagggctggggaaaacaaggccaagagagcctgctcagaggatggtgctgcttccgtaggttgactgcagcattaccttctttgccgacactgtgaactacaggagtagaggaaatgtgtgtaatttaacagctggcgcactctttctcaggacaagagatttaattttgtggtcaagattgttgataacagtgtagtgtagaagggagaatcacagggtttgctttatacaacttggggagaagaaattgaggttttgggaaagtcaaggagagagaaaacgaaagatgattgaaaacagagatagagcagaaggtgatgaaaagtggtgttctgtgcaccatgaactctctttcccccacccgaaagttttcaacacctagaaaaaaataaggaaaggtcttatagccaccggaatcacctggtagccggtcccagtcggaggcatcaccaaattgccgcttggccattgtgagagccctggagttgcttctgctgtcttccttcttccagccctgatcttgactcctcaggccacagtcaggtacttcccaaaacacagaggaaggtaaagtcacccttcttcctaaaggggcaaatactttccagtttccccccaaataaattctgcaaccctgggattcctttctgacactcacctcccaaatccaattaccttctatgaccaaatgctctttgaacattttctaaaactcagcagtctctacatcctctgcgtttgtccttacagtttccatggcctgggaggacctttgttctcctaagacggggccacatactgatcatctgtcaaggacaggctcacacctgccttcctcttcacttcttactgtgacattccctgggactgtactgtatcactctctttcctttattttaaagccaagcatacaattgatactctttgatgtttgcaaaactaataagttattgccctctcatacagaatcctggagtgtgattaattactgtcttctctttacaagggactctacatgaaatatcatggagaatgattatgaatagtcttagtatttcatgtaacttctgtaatattcctagcaattgtgtcttcacagtcaggattgatgaccagtgctgtcaagttcccaaagggtatctaatgctggaatttgcaaatgttcttttggagtgaagaaaattatgttatttaggctgactgaagaatcactaaagaaagaaaattatggtacagtaatatttataaagactcataatcctgtaaaaaacttcctcaccataaccacactttccacagccacatttttagagatttggtgagggtggaatatagtcaaaggtgcttcttaatcatccttgatgaaatcaaccaaaatcaacctacaacattgaaaaaaaaaactagctttgctcagtaatggaatcttatcatccttgacaatgaaaagatattatgtgtttgtgagtgtgaatgtgtgtgtgtgttttcttgtggatactcactcacatagaagtttctcccctggtggcattttatgaggtgctggatcactggcagagctcctaggcacttctaggtaaggatagaaaatagcagacctaacggaatctgcctaagttatagctgataagatagtttatttcaagattttatacattcagaaataaatttgtaaaatcaaaaaatcctttttataaaatgtgcttgctaaaatttgtgaataattaaactaaatgcaatgtgtgaaaagatatgagtctgactaatcaaagggagctctgcaatgtagtattttcagcccagattggcttgatattgtcacactttcatcctgtggcctgtataattctggctcctttcttccatcttatgatgctcattgcaataatgtaacagcaatttcttgtgcaatcaagatgtgtccttttgtctccactggtcaagggtgagtttgaagttccaccctaaatcaacccttccgggaaagcaatagacagggtgtgtgaaagaatgggggctgcaggggttggagtgggggcaaccgtgttcctgacttggactatcctgagctcatcaggtcagaaggtgtgaatccatgggactgtggaatgttggccacttgggggcgctgtggccccactatgctgcagggaaccctggggaggggtgggagggtggccaggaagggagggcggaagggaatgcctggctgcctgctgacatcaggagattaggtggaaattagagtaggtcctggcctgggactgcccagggaaaggtagggccagggttggcaccaagcagggagtgtttctgcctctgcatgggcagaggagggtgtaggggctggggtggcaagggctgggaatcagtgtcaggacagggatagggtgggcagaggaaagtgaggtgtgatgtgggcatgcggggactgtgaccagccacctcccctttagttgaggggctgtgcgggacaggaaggctgcatggagctgctgagcctgagtctttcaatgggtgaacaaggcaggagtggcctgcagaaagagtacctggaaaaggactgtacccgaagaattgggtgacactttcttagctccactcagggagtgaccctgaggagggtgctgccagccagaggggctcaggtcctggtgagctgacaggcttttcctccagacacttcctgttgtttctgtatgtgatctggttttatgctcactgaaatcatgtaaggtaggtatgatttcacctgtttatacatctgaaggaaagcagctgttccgggtctcatattaagtaattggctgaggtgttttcctccaacatctctgcaccagccccgtcccccgactctatatctgtcccttcatctggcttcccctttccaggtccaattagcaggagcacaaggtcatgcctcatatgtgaccattgtaacctcttccctgacaagtccaaggaacacgtgacttccaggccaagcatatccattcacctttcactgaagcaaaacagaaggatgaaattatctgcactgtacacttcctgtaactgatataatctaccttgaggaaaagtaacaagaaaaattgttattcattagttattattttatttaatatatgtttggagatcctttctttgtatagatattttatgacataaaaagcaaaataaaaaagaacaaatgaaaataaaaaagaaaagcttgaaagaataataagtgtttcttactttttagagtattaaggtttgcattaatttttttaacttattcaaagacgtttgctcagtttctgaattatacagatttcctttttttcttctctttttctctttagccacctacagctttttctgccagcttttttagtttaataacctaaggctatcttttaaacagatttttaaatgtacaatatagtatcgtaatctacagacacaaggttggacagcagatctctaaagcttcctgattcttctttactgaaattttgtagccactggcggcagctgcccatttccccctcttcctagcccttggaaatcaccattttcatcttcacttacatcagtttgacttttaggttgcctcatataagcacaatcatgtagtatttgtctttctgtgcctgactttttcaactcagcataatgtcctccaggtttagccacattgtcatgtatggccagaatttcttctttttaatacttaatgatattccattgtatgcatacaccacatttaaggtctgaatattaaatgtatagtatcttattgtttctgcgaaaccatctgtcacaggagtggcagggtcatttgcagaacagtaagcactgagtatatgaatgcacattcattcgaagttcaattctgcttcatagagaagacttcaaaaaaataataatttcactatttattgttattttactatacacaaatagaatttcttttttcttttttttttttttttgatacagagtctcgctttgtcgcctgggctggaatgcagtggtgtgatcttggcccactgcaacctctgcctcccgggttcaagtgattctcctgcctcagcctcccgagtagctgggattacaggtgtgcaccaccatgcctggctgattttttgtatttttagtagagatgagatttcacagtgttagcctggattgtcttgatctcctgacctcgtgatctgcccacctcggcctcccaaagtgctggtattacaggtgtgagccaccgcacccagccaataccccaataccataaaatatttagcatatagtagaaatctagctatttttatttcctttgctagtctcgggcagcctcttccactgcgccaatgcccaaaggcagttaaagacacattttgcctggaaatcttagggtgaggactcaggaagccacagaaatggaaatacatatgcgtgatgattactttgaaagtatgaactagagaatgtagcatatatccctcctcaggcatttaaaactcagtattattgatatataagttatataagcattacacattttaaataaacagatcggttatacgtaaccaaataattaacagaatgaggagctcctgaaaagttttatggttttaaaaggggttgaagccaggtgagctaccagatccacattagggacaattctatctggagatggatattgtgatgaaacaacctcagaaggtcttctaacctggtacagactgattttacgaagtttatttattcattttctttcatttcttttcttatctgctcattcactccaattattttgtaatgatattttggcgaaaattaatcatctttaagggaaatattttgagtttcatcagacacacatgcagctgagctttgtgttcacacactgagtgccctggggccaaacaaaatacggtaatagtgaccttgttgagagatgacgtcacattgggagaaaggttctctttgtgttgacactaagtgtccaattcataaaacctaagccttgagctaggaaatgcccttttctgccctgggaagcaggctcctacattgtgtgtttttctgtctcctggtctagcctggacacagacagtgtacccactcacgaacttgttatatcctggctgtgaatttcagcaccaggtggccctttgctctgacttcaatttctgtgtccttctctcctaaacaccatggatgctgagtgactcagactccagtcatgtgcttttgccaaaaggaaactagcacaagaggaggtgagcagaatatgaaacaaaaccatgtactcaggaccggcaatgtgacttactggcagctctttgctcaaatattgtaaggaagttgaagatcatgacaatgttacagtaacagggatctctttaagtgtggggctctgtgcactaaaatacgggtttttttttttcttttctttttttttttttttttttttgagacggagtcttgctctgttgcccaggctggagtgcagtggtgcaatcttggctcactgcaaccttgcctcctgggttcacgtgattctcctgcctcagcctcctgaagtagctgggattacaggtgcgcaccaccatgaccagctattttttttttttttttttttatttttagtagagacggggtttcaccatgtttgtcagactggtcttgaactcctgacctcatgatccgcccacctcagccttccaatgtgttgggattacaggcgtgatccactgcgcctggcctttttttttttttttttaattgttactgaattagtggtgagaatcctgaccaagggaatattccctatgaaatatgacacttcaaataaaatgagagcgctttttcttatcctggagcctgcctcttctctcctctccccacatccctcacatgtcaagacacctttgtgcccacagatcatgggcagcgttgggctgccactatcatccacacagagagggcagtcagcagcgtgaggtggttctgcctgctgcggtctcaccccaggcacagaaagcaagagccctgggtggagctgaaggtgctcagctgggcttgtcaggagtcccatctgtcggtgaattgaaaagaaacagagcaaaatgactcctccaatggtgatgagcctgcccctgggatttggaaacttggtaacagagaaaaccaatatagacaaaggattttaaacaggattatggtcaattaagcaaattagaaaaggatacttgaagggggatttgggacacaggagtcaaaaacaccgggaagacatgagaagtttccctaagagtctaaattagagaaatatttagataactgacaccagtgtatgaatgaggaattatatcatcacagggataagagttccattgagttacaaactgcttccaaaaaggttaagaaaaactcgtaaggctgtgtcaattcagacaaaggcattcttcccattcaaacggttcaccggtgcatgaatcttgaatttgaccatctggggaaggggcgtggcctctcctgacaggaaggctctggggcccaggcagggagaatgaagtctcagaatgacccccttgagagtcctgttcccctatcaccgatgcacagacccagaagacccctccatcctgtagcacctgccatgagcatcgggctcctgtgctgtgtggccttttctctcctgtgggcaagtaagtcctgggcagggccccatgtgtggatttcaaggcccagcctgtttccattgtggctgcagcatcagctttgttcttctctgcaggtccagtgaatgctggtgtcactcagaccccaaaattccaggtcctgaagacaggacagagcatgacactgcagtgtgcccaggatatgaaccataactccatgtactggtatcgacaagacccaggcatgggactgaggctgatttattactcagcttctgagggtaccactgacaaaggagaagtccccaatggctacaatgtctccagattaaacaaacgggagttctcgctcaggctggagtcggctgctccctcccagacatctgtgtacttctgtgccagcagtgaagccacagcgctgcatggccgtctcctctctgcacataaaggcagggaggctctgcctcctccctcaccccagactcagtgatgccctgggcagagttctctgcaccaggaaacttgaaaccccatcatcatgggtctgaggcccccaggatgaaacaggatttgtatttcagatccatctagactctcgtctctccctggggaccatgttgcttcttctctctagggttccccccagcccccaccctcatgttgtctctccctggggaccatgttgcttcttctctctagggtttcccccagcccccaccctcatgttgtctctcctgtggcccacctttcccatctgggcagtcaccctccaaggccttgctgggtctctcctcccctcacttccccacacctctccacagcagccatgaggggagcccctcttctgtgcctccttccttcccatcacagagacttcaaagtccattttctctgccctgggctggaggcttcctttctgcagtggccaactcctacctgtgcttcacatctcagcatgatcagccctcctgtgggaagcatgcccttgcctcccagctgagatcaatttttctgttataagcactgatggtaaaatgtgcttgttagtcaacagagttgagcacagttggagttttccagttacttgtctggatatttttctgctcatgtcgattttaaactccataaaggggaaggctgtgcttgttacatttaccaacagctgttcctggaatgaagggagacctgtttcacagataatggatgagttaatgaatgacaggctgattgagtgatgagcgggtggatgaaccaataacaggaacactccaggtccgctgtaccctggcagaaatctagagttaactgtgcctgagatgctctgctatgagctcttcaaagggcactcgcttgttgaacaagcgttggaccattcattgtgcaagccagtttgtcagttcatctaggagtttccaattttaaatatcatatgttcttcaaactcaatgagggtaaagtctacattatacaattctaagttattttttaaagttttgggttaggaaccaaaaaggaaagaagagggaatatctttagactttggagtttttttattgaaaatgtatttatataaatttttcttggaagaacaggtagggaaagtcatgactacacagccttataggtgctaatttctggagaaggtgtcatgaaaaataacaaaaatgagaactgtgttctggagggaacattgtgactgtcctgagagcgtgttctgatcccaggaaccaaacccaggagtgtgtttggcaactcagagtgcagcagacaattctttgccccgtgcatttgggataagactggagacagctggaaaagctatggactggacgttctgcactctcaatgcaggactctctgaaatcccacagattaatgtcaggtaaatatattcccactattaagacaactaaagcaagaaccaatgaagaaaagtgagtagaaacagtaagcaattgaaatgtatgaagacaaggaattttgccataaaaagatataaaagttaaagagctatatttaaaggaatacaaaagcgaattgatatgtgaacatgaaaaagaagactgtcagaaataatcaaggaaacattaaaaaataatcaaagagaatacactaacgattaagattatcattgaaaacaaaatggaaatgaagaaaagatgacatgcttcaaaagagattgttacaggaggtcaaagacagatctgaagaagttacctagaatgcagcacagaaaattaaacaggaaacaagaaaaggtaagggataaggaataaaacacttgtgggttctagtgtattagtgtatatataatattttgttggaacttcccatttttcttacacatgattgaagtgtcacaaagagaaagtagagagaatgataggtgataattatgagacattagctgagaattttcaagacgtgtttcaggacctaaatcctctgtttcaacaagttaaatgaatatgaagtagatgaatacatatgttatggtgaaattgcggaacacaaatgacaaagagaagattttaaaagtagcccaaaagataactatctcccagcagaatagactgaaaggaacagtgaaagtcaagaaaggagattaaaaataagcatcaagtcagaattataattctcattcattaaatattgagattgaggtaaatatatttatagatagagaaagaaaaaacacggtgagtttgtcaccaaggtatcctttctgaattatagttaacaaagatgggaagtggtcccagaagaggggcatgaggtgccgctcgtgagggaacccatgtgatgggacagccccattgggcacgtgtgactggggggatggaggaggctggggcatcaatggggatggcacaggggactctgacttgcaggaaagacaatgagctcaccttttggtgctttgtgttggcggagctgttgacacatcctagagaacatgcccagcagacagaggagcggctgtgggatgaggagataaactcagagatgcagcgtgaggcctccgggtccagacagcatgagagcccaaagcgatgatacatgcattgatgttgttaaaaaggattttttttttttttttgagacagattctcgctctgtcgcccaggctggagtacagtggcgcaatctcggctcactgcaagctccgcctcccgggttcaagccattctcctgcctcagcctcccaagtagcttggactagaggcgcccgccacaacgcctggctcattttttgtatttttagaagagacagagtttcaccatattagccaggatggtctcgatctcctgacctcatgatccacctgcctccgcctcccaaagtgctgggctcacgcctgtaatcccagcactttgggagaccaaggtgggcggatcacttgaggtcaggagtttgagaccagccggggcaatgtggtgaaaccccgtctctactaaaaatacaaaaattagcctggtatggtggtgtgagtctgtaatcccagctactcaggaggctgaggcaggagaatcacttgaacttgggaggcagagtttgcagtgagccgagatcacactgctgcactccattctgggcaatggagcaaggctctgtctcaaagaacaaacaagcaaaaagcaaggaactcataaatatttaaaggagtcatttaagtaggtcctaaaataaatcctttgttcctgtcattgcgtggattgagagaggatgtgatgtcactatgggaccttctgtgtgggaacaaggacatccctcctcctctgctcctactcacagtgactctgatctggtaaagctcccatcctgccctgaccctgccatgggcacaaggctcctctgctgggcagccatatgtctcctgggggcaggtgattcctcagatgccaagcagtctcctgtgtgtgtgtgtgtgtgtgtgtgtatgtgtgtgagatgtgtgtgtgagagagagagagagagagctgactatagttgtttttctcattcagttcccaatttctgtctccacagatcacacaggtgctggagtctcccagtccctgagacacaaggtagcaaagaagggaaaggatgtagctctcagatatgatccaatttcaggtcataatgccctttattggtaccgacagagcctggggcagggcctggagtttccaatttacttccaaggcaaggatgcagcagacaaatcggggcttccccgtgatcggttctctgcacagaggtctgagggatccatctccactctgaagttccagcgcacacagcagggggacttggctgtgtatctctgtgccagcagctcagccacagcactactgctccagtgtcagcttggttccctaggaaatggggtttctagaacctgaatgctgacaaataagagttgtatatgtgtataccatgcaacctgcgtttaaaaatgtatgtacatagtgcaatgactaaatctagctagttaacatatgcagtacctcaatccttatcctttccagtggtgagaatacttaaaatgtactctgttagcattttcccagaatacaaaccactgttgctaactctagtcatttgttgtataatagatctttgtaacatcttcgtcttatctgagtgagattttgtatctgttgaccaacatcttcccaacagtccatctctactccagcctttgctaattactgctctagtctttgaatttgaagtaatttccctgaggtctttagctcaacaagatgggggaattttctctataatgatgcttacgttatttttgctttgtttttgtttcgttattttatgtcttgcaatatagtgtttattgtaaatataaataagtatattgtaataaaaatccttcacctctctttgggtaaagctacagttcacatattctaaatttcatgctgtgaccaacgctgacataattatggatcatgggtttctgggagtcctcagagacagccccatacaccaagtttaagatagaatattccagacccagccaggacagaagtgcatggtcctgcatagctccttggaaaattatagttccccaaattcagttattggatattgtggtgccgcagacaccaaacgtctttctctagcaaatgatggtccttggcagggattgttctgaacccattacaattttgccatcatcaaatcactccttgctgttaccttgtgtctcctgggagtgaggacgccccgggcacagatggaaattccctgaccttcggatgctatttcaaggacttcctaagaccttgtgtccatctttttccacctttatccacatgactcctgagacccacgctcacaatagtggaccagctctgattcttaggcttgaacagaattcagaccacagctgtaaacactgttgctgaaaaaagatgtaaaaaaggtgggcagggcttcctacctacactgagggtgaacatacaagggcataaagggaatattttattaatagctaaaaaaagaagaaatacaagccctgctctaatgaaatgagaactgtagcttcacccacagagaggtggaagattttattacaatatacttatttatattcataacaaataatatatttgaaaaaataaagaaaacaaaaagtaatataagcattattataaagaaaatacccctgtcttcttgagttaaagacctcagggaaattaagacacatcaaaagactagagcagtaattaccagaggctggggtggagatggggtgctggggagatgctggtcaaaggatacaaaatttcactcagataggaggaagaagtttaaaaaatcttttatacaacaaagtgactagagttaataacactggactacattctgggaacatgctaacagagttgaattttttagttgaaccaaagcagaatgtccataaaattattttgaatcaaagtctagaagctttcaaaccagttggcatagccttgtgttctgtgatctcagcagcttcagaggacttggcaatcctttctctgcacaaacacccctttgtccactctaagaactagggacacacactcttatcctatcacgaaaacaacaggctgtgctacagttgctggtaactcgttttaagggtgttgagtatggaggattgaacaagattgaaagctatgctcctgagtctgggaatgtgctggaaccagcttgcatgattcagaagagccaaataggcaaacccttcccaaatcctcattgaatgaagccatgatgacagcttgaaatctgccatagtggctatgctgataccataggaactgacaaatgctactaggcatggccccaccctcacagatatccagtttacaaggacatcactggaatgttttctgatacaatgatgatcctattagggcatgtcttatggggccaaaaaggctcagaatccactgtccatctgtttctgctcctagaagccatagtctaagggaatctcaagtgatcctacttctctccaatctccaaattcccttgctctgtgggtctgtgtctcttatgagcatgccaatctgaaacaagacaactatttggaatgtagctaaaggaaacagggaaccagtccattattttcaaattatccttccttgcatgaagtatgcagatgctgcaatcactgaaaacagagatggggcaagcagcagctctgggctgtgagtcactttatactatagtgccccgctattcctctgtggcactgacagaccctgcagcatggactaatttgcataggaaactaagcagcccctgaccatcaggtatgaccctggattcattttgggctgagaggtcagaaggatcatactcaccttaaatattatcctctccaagctgcaatactcccactgtccatcttagtcccaggatgttgtccagagctccagagaatcccttctcttggggcagaatcaccaagcttgctccctccagatttccacagtctccagtgggtatggggcacaggtgccattctgtgtctcaggtagagagaggcatcatgtcaaatgatatttgtagaagagggattcaaattctgaggctcctctccaatatttgacataattttctttgcttcttgtttcattctacaatctcacaatttaggagagtaattcttttgcggttgcattgttgacagcatttgggaaagtttttgtggttaaattaatttaaacaatcattttaatggtgtatttcttctgttcacgatagaacagtgaaagcagtcatttacacatcctgttgatgaaggtgttgtttaaggttcatgatccacacctaactctcaatctagttgaaatgaaaaggtgcagaattaggtggcacgtgagcaagctatgagagaggctcatgccaattactgtgggatttggagggagggagagatgacctctgctctagaccatgctccacgaagaaggagtgggagtttgtccatgggagactgcagaggaataaataccagcagcttctaactggggtggagtgagggctgcgggagcaaatccttggaacagaaaatggtgcatttgagctctcacagaggacagtggaaagaaaagtcatataggccacagtcccccggcaggttctgtttgctaatgatactattttgcaccagtgtgtccttatctcacaccactcctctgcctcttccagaataatctcttccctctccgctgctcagatcagcagatgtgccttgtgcaagttactcatttcacatagcaggccttttgctggtcttaattatatccgtcgttactttccacattagatactgtgtattgccttgcaaatgatcctactttttatattcctatttttcacttgttaatgcatatttgaccccttcttgaaggtcaagatgaccttggaaatataaggctatctcattatctggtcagtcttttactaatctttatttttatcgtaacattgactgtcattttgggggacatgtttgtttatcttgaatttcattgagtttcctcaaagcacgattttgagttctttgtcttaaaggtcgcatatctctgtctgtctagggttggtccctgttttattttttttttgagaaattaccgacttcaccagatgctgtaagctaccgggatagaggaagtttttgtgatttcatagcttgggtcttctttattcagggcagggaattttattttggggtcaagattgttgaaaatggcatagtgaagaaggtagagtcacaggagtttgctttatatacttgaggaagaagaaactgagatttgggaaaagtcaagaaaagagaacctgatcaaagatgactgaaaatagtaatagagcagaaaatgatgaaaagtcgtgttctgtgcaccacgaacgttcttctccccactccaaaagttttcgacacctagaaaatataaagaaaggactgatagcaactggcatcacgttgaggccagtctcagttgggaaaaacaccaaacagccgcttgtctcctgtaagaaccctgaagttggtcctgatgtcttctttctggactctggccctgatcttaactcctcagggaagtcaggtacttcccaaaatacagagaatgtcagattgcccttggttttgaaggagaaaatgctctgtgcttctccccaagataaattctgctttcctaggaatgctttctaacactcgtcatccagatctgattaccttctgtgaccaaacggtttccgaagattttgtaaaactcagcagcctttcacatcctctgcgtttgcactcactgtttccatggcccagaaggacatttattttcccacgacagggccagacactgctcatctgccaaggacgggctccctcccacctgtcttcctcttcacttctcatcccagcattctctggcactctatgatatcactctcttcactccacaggccaaaccaagaatataattggaactgcctgatgtttataacatgaatcaattcaagtccacttacatagacccctggaatacatgaattactatctcctctttacaagagacttctactacatgaaacatactggagagtctttagggataggctcagttttctacacaaattctgcaatatcctaaacaattctgtcttcacagtcataattgatgacttgttctctaaagtacccgaactgtgtttaaagtcagaatttgcaaatgttcttctgagaaaaaagaaaatcattacatcttagtgacatttatccagtctcacaatcttgctgaaaaatatttgtcatcataaccacactttccatgaccacatctttagatatttggtgagactggaaacatcaacaatggtccttctcagaaatcaacttaaaacactgaaagaaaaagtagctgtgctcagtaattgaacctcatcagccttgccaattaaaacacgttgtgtgcatgtgcttgtgagtgtgagtatgttttcttgtggagatgcaaatagtttctgtgggtggcatttactaagcatcactggatcactggtggagttcataggcactttcctaaccccagggagtgatgggaaatgtcacagccactgaatcggcctaagttatagctgatagggttgtttattttaaaattttacaaattcagaaataaatttgtaaactcaaaaaatggggccgggtgcagtggctcatgcctgtaatcctagcactttaggaggctgagggaggtggatcacgaggtcaggagtttgagaccagcctggccaacatggtgaaaccccatctctgccaaaaatacaaaaatttagctaggcgtggtggtgcacccctgtaatcccagctactcgggaggctgtggcaggagaatcacttgaacctgggaggtggaggttgcactgagccgagatcgcaccactgcactccagcctgcgtgatagagcgaagctccgtctcaaaaaaaaaaaaaaagaaaatcaggaaatcctctcttataaaacacatgatgtaaaatttactgatattaatttaaatacaaaataggaaaagattgggcctgattaagcaaagggagccagggaacaatgcagtgtttctgggctaggtgggcttgacatcctcacactgtttaattaagggtctgtgtaattttggctgctctctaagtgcaacaacggtttattttgtaataaaaagattggttcatgtgtccttttgcctcacttggcccagggtgaatttgaagatcaaccctaaattggccttttggggaaagcatagagggtgtgaggatgagggttgcaagggtgggagtggggcatctttgttcctgatttggacaatcttgaactcatcaggtcaggtgtgaatccatgagactgtggaatgttggccacttggtgacgctgtggctccacaatgctgcagggaaccctggagaggggtgggaaggtggccaagagaggagctgaagcctatgcttggctgcctgctggcttcaggggagtggtttgattcagagtggatccagagttaaacacaaactccccactaccagagaagagtagaggtgctggaggcctcagtttgcaccaaagagtagagtgtccctgtgtctgcttgggcagtggatggtgaaggagcttcagccacaagggctgggaatcagtgtcagggcagggacagggcaggtagaggaaagtaaggtgtgatgtgggcatgtggggcctgctctccacccaccaaacctttagtttcagggctgtgcgggacagatgcatggagcagctgagcctgggacctgccaaagcgtgcaaggggcagtggtggcctgcagggagagaaactcgcaaaggccagttcccgcaggaagctccagaaacattcctgcccccactcaggaagtgaccgtgagagacatgctgtcagccagaagggttcaggccctggagagctgataggcttttcccaggcactttctgctgcttctacatgtgatctgctttaatattcacataaattatgcaggataagtattattttacctgtttatgtatctgaaggaaatcagctgtccggggtctcatacttaataactggctgaagactgggtgcagtggctcacacctgtgaccctagcactttgggaggccaaggtgggcaaatctcctgagctcaggagttcgagaccagcctgggaaaatcggtgaaaccctatctctactaaaaatataaaaatttggccaggtgtggtggtgcacacctgtaatcccagctactcaggtggccgatgcaggagaatcgcttgaaccctggaggcagaggttgcagtgagccgagatcatgccattgcactccatcctgagcaacagagtgagactctgtctcaaaataaaacaaaataaaataaaataaaataaaataaaataaaataaaataaaagtctcaagcctgttgtgccaacacctctccttaaccccttctttgtagctctatcctttcacctgctttcccctttacaggtccccatcaacaggttgtgaagttcatgcctcatacgtaatcagtatagtctcttccctgagaagtccaaggaacatgtgacttccaggccaagcatatacattcatccttcattgagacaaaaaaaaaagtgtaattttctggccagccatgatgcttcacagctgtaatcccagcactttgggaggctgaggaggtgaattgtttgagcccaggagttcgagaccagcctgccaacatggagaaaccacgtctctactaaaaataaaataaatcagccaggcatactggtgggtgcctgtaatcccagctactcaggaggctgaggaatgggaattgtttgaactcaggaggtggaggttgcagtgagctgagattgtgccattgcaatccaggctggacaacagagctagactcccgaaagaaggaaagaaagaaagagagagagagaggaaggaaggaaggaaggaaggaaggaaggaaggaagaaaagaaaaagaaaaagaaaaaaaaaggggtggtaattttctgaactgtagacttcctgtaacggatgcaacatatcttgagaaaaaggaacactagtaattgttattcactagttaatttattttattcttttattcaataaacttttttgggggacctactgtgtataagataccctatgtcgtcaaatagaaaatgaaaaagaaaagtatctgcagatgatggcagattttaaaaaataaaaaaagaaaataaataaagaaagaaagaatattttaaaataaaaaatattttttggctatttataacactaaggtctgcatttattttcatttttcaattgttttatgtttattttcaattgttttatgtttagtgtacttagtttttgaatttatatatttcctttcttcttctcattctctctttggtttctccttctctcttctttgccagcttgtatttcttttttatttaaacttttggtaaggacatttaacatgagacctatcctctgaacagatttttaagtgtacaaaacagtatcatagtctacaggcacaaggttgtacagaagatctctaaaacttcctcatcctgcttaactgaaattttatacctgttgacagcaactccgcattttccccaactcccagctcttggaaagaaacattctcatctttgcttccatgagtttgacatggttgcctcatataaacagaaacatgcagtgtttgcgtttctgtgcttgacttgttcacttagaacaatgtcctccaggttcatctatgacacatatggaaggattgtttttcttttctaacccttaataatattccatgtttcagatctgcaggattaaatggatataacatttggctatttctatgaaactctctgtcatgtgagtggcagagtcatttgcagagctgcgagcactgagtttattcaggcacattcacagataaattctgctccatggagaacattcagaaaaaaataataatgccaacttttatttgtcaattcactatatgccaaataaaaatctttcatttgaaaaagttcaattaattagaaattcagctatcagaaaaaaaccttaagatgcaaatgctattctcattttacagatgagggaattggctcataggttaaaaaacttgaccaaattgaagagctattaggatacagtattgggacttcaacctgatctgtccaatttttgcatttataactctgtgctatagtgcatttcatagagagagatgcctaccttcaaaaatcagaatattggatcctacatccctttcagatcaactggctctaacaacatggaaagagatcagtttaccctggagacagtgatgtaaggagagatctctggctagatgccatgacactcagccctgactcccattctaacaccaacttgtaaagacctgaggccattcttgacatgctgcgtttagtttgtgttttgggtttttatttttttctgtaaaatgagatgactactgcccttatgaagagttgtacaaagatttaatatgacaaagtatctagcatatagtagattctagctattttgatttcctttgctaatctcaaacagcctcttccactgtgccaatgagcaaagacaaatatgaacacattctgcccaggaatcttaggttgaggactcagaactcacagaagtggaaatatatatgcttgatgattcatttgatgaaattacctgcagaacatagcgtacatgccttctcagacattttaaaatcagcacaattgatatataaattgtacaatataaacattacacatgttaaataaacagatcaatggttttatatatatatatatatatatatatagacatatatatgggttataaggatatatatgtatatccttataaccactatccctataaaaaggtctctatcacccagaaatctctctcatacccctttgccatgactctctccatctctgacaaccaatgatgtgatttctatcactggagaatacatttttttcaaaaaatctattagtaacattttaaaacctgtattgattaatccttttcaaatacatacatttaagagtgcaaggtgctcctcgaaagttttatggttttaaaagaggctaaatttctgtgagctacctgatccatgttagggacaatcctatctggagataggtaagaggatgaaatagcctcaaaattactttccagctggtggaagctcattctccaaaattatttattcatttttatttatttcttttatcatctacccactcattcaaattatttattttataatggtattgtgacaacaattaatcattttaatggaattattttgagttcccatatcacacatatttaattggccttcaagttcacacactgaatgcaacggcaccaaacaaaccatggtaacagtgactttgttgagagatggtgtcatatgtggaaaagggttctctttgcttttaccgcaagtatccaacccataaaacctgaactttgagctaggaaatctccctttttgttctggccctaccctgggcaccaggctccagcaccatgtctccttctgggttctggcccagagaagttcttggcacagttgtagcacccactcatgggcttgctggatcccagctgtgaatgacagtagcagggccccctttgctctgactttaatttctgtgtccttctcaaataagccctatagatgctgagtggcctgggcccctgccatgtgcttgggctgaaagaaagacagcacgtggggaggtgagcaggagcgaagttgaagcaaatctagaattgacatggaaaggactttggacataaatccctaggcagtggtgagccactggtcctactccaagtgaaacaacatgatgaaactgatattgtgttacagtaacattggtagtagtacggatctgaaaggagatagatttttgggtggcatgaatgattaggagacttctaaatatcctccatgaaagattagaaagggtttatgtaaagcattgtggaagacataggcttgaggctctggattatgttatctcttggaaagagtgttgggttttattctggaagggttaaatgtaggacttgctaggttctatttgagctttgcccttcctcttagggagccccagcctgtggtcatcattgctagtgcatggccttcccagggtcttagtgggaatcacagtgtattcgccacatcactccactgcaactgggtctgaatgccctggctcttctgaaatctctgcccatgtcttcagccttccagaacttgttctctgctcagccttctggtctgccaccctctgcatacacaatttaggatctggctcaggaaaaaaaaaaggggggtttcttacatataatttttgggttcctttttactaccctgtgtcttaaatcccagctgtcttggagtcagttatgtcctatcttcaatcacataaactaacgatatttggtacagacatgtttactgactttacttcacgttaccattccactcttcactcttctttcttgcaattcagacagtcctgaggtcattctccttcttcagatccatctggaattcagatgacttcaactcacctgtcacccaccctatgctttgagacatgtttatgttagctactgacctcagggtagtcaagcctctcattgtcattgttattcaaggtaggttgaatcccactaaaaaacaaaaatccttgaaatttggtttccttattgagagccacacaatgcaatcaaattctttttaattcaatttttttttcttttttggtggaagggccaagaactgtttccttgctgaagcagactcctattataataatttgaatactaacaacattaacctttaaatcaggttgatgttaggttcttatctaagaatgaagtatatccaactgtagcaggttgaaggtctctcatatatgtaacctgttcaggacgagacaattcaaccacttttcttaaattctgatctacatgcctttacattctttgctttaagggccacataaaaatactctgaaacaatttacacatcagaaaaatgctaacactttcctcctggcccagcacatctccaagttaaaaaaatctctaaattatcaacccatagtttaatcatggtaactcccttctacccccaacatagatttttatgtaactgatttgtaactacaaccttaaccgtacaatcacaattgtcattataaaatactaacaaacatgtgctattaacaatggatggttaaaatcacttagggattatgaatcatttcatttttgtgtttatttattatgtcagtttcaacctgatttccctttcccttgttccacacaccttgggttgttctttttcagcatcctgtgtatgttagctctaagcccagccaaggctcatgtccctccacttcagggacagagggtggctcatccctttcgtgctccctcagctccctccccggtgcctggttgctggttggcatcacagccatgcccttgaaagatgggcgctggtccacactgcatccgtggtcatgtagccaccctccctccacagaaccgagcaaaaagggctccaccgcgcttaggcattgagggaatggacattttgaatggtgctgtcttgtgtgatccctcagaggagaaggagatttcttgaatgggagtggtctgttgctgagagggatcctgaaagacacggggacagagacaggggtaggatccacataatgaggaagcagctgagaacaaaggagcccctgccagaggaatatccttggggggtaaaaagctggctctgccctttctccccagcccattcatcccagcccagacaattcaaatctgccttctatcaggacctagaaaggatgtaaaacggccgggtataaatatcccctgggtctggggaaactgtcaggagcagtgacatcacaggaaaaaccaccaaccaaggccaaggagaccagagcccagcacctcacccagaggaccccagtcagaggccccatctcagacccgaggctagcatgggctgcaggctgctctgctgtgcggttctctgtctcctgggagcgggtgagttgggttcacatcagctgtccttgaattcgaaactttttccttgtgatttcagcaacaagcctcctcctgggctctgcctgaattttgtccctttccccccgcagtccccatggaaacgggagttacgcagacaccaagacacctggtcatgggaatgacaaataagaagtctttgaaatgtgaacaacatctggggcataacgctatgtattggtacaagcaaagtgctaagaagccactggagctcatgtttgtctacaactttaaagaacagactgaaaacaacagtgtgccaagtcgcttctcacctgaatgccccaacagctctcacttattccttcacctacacaccctgcagccagaagactcggccctgtatctctgtgccagcagccaagacacagccttgcagagtcaccgctttcctgtgtagaaaccttaggggccctccaggaagctttgggggccaccaaagccttcgatgaacatttcctacaagagccccgacagaagattcagaacatcatagcacctttaatggcataaaatatctagcatatagtagaagcctagctattttgatttcctttgctgatctcagacaacctcttccaccacaccaatgtgcaaagacagatatggacacattctgccaagaaatcttaggttgaggactcagaagtcacagaaatggaaatatatatgcctgataattcatctgataaaattaactagaggatgtagcatacatatctcctcaggcatttaaaaatcaacattattgatctttaaagtatatgaagttaacaggacaccttttaaatgaacatatctgtgatttttgagcaacatatatctatatatgcaaccccacctctatgaagatgtatctgcatcacccagaaagtccctcactcccctctgcaatgcctctgtctgtcccagcaaccaatgatgtgacttctatcactggagagtcgttttgttggcaaatatttttaatgcaaatgtcaaacctcttctgaataatcctcttgaatacatagctaaatcatcaaggcagggaggagttcctggaggttttatggttttagaagtggttgaagccaggtgagctacctgacccatggtagggacaattctatctggagatggatattgtgccaaaataacctcaaaaggtcttttcggctggtagaagctgattctacaaaatttattcattttcattcgtttattttctcgtcaattcattcaatcaaacaattttatgttacgttttgacaaaagttaatcatctttaaggaaattattttgagttcccatcagacacacaagcagctgggctttgtgttcacacagtgagcatgctggggtcaagcaaaccatgatcacagtgacttcattgacagatgatgtcttattgggagaagggttctctttgacttgaccccatgtgtccaacccataaaacctgagccttaggctaaaatccatcttccttttctcaccctgccttgggcaccaggccactgtgctgtgtgtttctctgtctcctgaagcagagtcctgggcgcagatttggaacctattcgtgggcttgtttgatcccagctgtgactttcagtaccagggggtcctttgctgtgacttgaatttgtgttttctttactcttaagttccacagatgctgagtgacccagaccctggtcatgctcttgtgctgaaaggaaaccagcacatggggaggtgagcagtatatgaaacaaaatcatgtatttacaaccagtggcaagacttactggcaggtgctttgttcaaacactgttaggaatttgaagatcatggcagtagaatgtgaaaccaagtgcagggtccttccaaatgcaggcctctgtgcaccaaagatagacttttggagctcattttttttaaacaaaaacggaaacaacactctatgttcatggctgtaggccatgcgagaatatttttttaaattttaatttaatttttatttttccatatattattggggtacaggtggtatttggttatatgagtaagtttttagtgatgacttgcaagactttggtgaacccaccagctgagcagtatacactgcaccatatttgtagtctgttatccctcaccccctcctgctgtttccccaacacttccccaaagtccgttgtatcattcttatgcctttgtgacctcatagcttcgctcccaaatatcggtgagaacatgctatgtttggttttacatttctgagttacttcacttagaataatagtctcccatctcatccaggtagatcattccaaatgctgtttattcattcctttttatggctgtgtagtatttcatcatacatatatgatatatatatgatatatatgatatatatgtgatatatatgatatatatcatatatatgatatgtatatgatatatatcatatatatgatatatagatgatatatatatcatatatatgatatatagatgatatatagatgatatatatatcatatatatgacatatatatgatatatatatatcacagtttctttatccactcgttgattgatgggcatttgggttggttcctttttctttatcactaaattaatggcagcaataaatccagaacattcctcattaccctaaagtcagccctgtctcccaaactcccttacacatcaggacacctttgtgcccatagatcatgggcagtgcttggcagccaccactgtccacacagagagggtagtcagtagcgttaggtggttctgcttgctggggtctcaccccaggcacagaaagcaggagccctgggtggagctgaaagtgctcatctgggtttgtcaggagtcccatctgtcagtgaattcacaagaaacagaacaaaacaactccttcaatgttgatgagactgcccctgggatttggaaagctaataacagagaaaaccaatatagacaaaggattttaaacaggactatcggattatgatcaattaagcaaattagaaaaggatacttgaaggagtatttgggacacaggaatcaaaaacaccaggaagacatgaggagtttttccaagattgtagactatagcaatacttagataaccaataccagtgtattaatgagtaattattagtattattattttgagatggagtcgcactctgtcatcaaggctagaatgcagtggcatgatctcggcttactgcaacctccgcctccctggttcaagaattctggtgcctccgtctcccgagtagctgggactataggtgcacgtcaggatgcctggataatttctatatttttagtacaggtgggatttcaccatgttggtcaggctggtctccaactcctggcctgaagtgatctgctctcttcagcctcccaaagggctaggattacaggcatgggccactatgcacagccaagtaatttgtatcatcatgggaataaaaaatatacattgagttacaaactaattaccaaaagatatttaaaaaatggtagacttgcatcgattcagacaaaggcattcttcccatccaaactgttcactggtgcattgatcttgaatttgaccatctggggaaggggcgtggcctctcctgacagcaaggctctggggcccaggcagggagaatgaggtctcagaatgacgcccttgaaagacgtgttcccttttcaccaatgcacagacccagaggacccctccatcctgcagttcctgccatgagcctcgggctcctgtgctgtggggccttttctctcctgtgggcaggtgggtcctgggcggggccccttgtgtggatttcaaggcccatcccctttccactggagcagtagcatcagctttgtccttctctgcaggtccagtgaatgctggtgtcactcagaccccaaaattccgggtcctgaagacaggacagagcatgacactgctgtgtgcccaggatatgaaccatgaatacatgtactggtatcgacaagacccaggcatggggctgaggctgattcattactcagttggtgagggtacaactgccaaaggagaggtccctgatggctacaatgtctccagattaaaaaaacagaatttcctgctggggttggagtcggctgctccctcccaaacatctgtgtacttctgtgccagcagttactccacagtgctgcacggctgtctcctctctgcacagaaaggcaagggaaggtgctgccctcctccgcagcacagattcagcgatgcccttggtcctagcaccgaaaactttggagccccaatgggcccgggcggtgcgagccttcatctgtgccaggtgcctctgcagtcggtctcggccaggcctggatcggtcccaggacctcagatgtcttccttgttgccctccggtctttcctctgaggtgtccttttgggctagtgccaggggtttcccagctctgactttcctagtcattcacctgagtctgaggcctcctaggtgaaataggatttgtatttcagatccatctagactcccgtctctacctgggtaccacgtgctttcctctctctatgatttttcctcatgttgaaccctacggtggtctcagctgcagcctgcatttcctatattcacagtcgccctccaaggccttgctgggtttctcctccccgacctccctgcccttctctactccagccatgttgagagactccaaagtccatttcctgtgccctgggctggagccttcctttctgtagtggtcaacacctacctgtgcttcagatctcagcatcatcagccctagtgataatcaccattatgcttcccttggctcccagctgaggtcagtttccctctcataatctctcatggtatcatgtgtctgttaatcagtagaatttagcacagttggaatcttccaagtactttaaaccccatgaaggccaaggctatgcctgggttataaatcagcagctgagcctggcacaaggggagatgcatttcagagaatggatgagtcagtgatggagtgagtgatgagtggatggatgaatccataacaggagcaccctagatccattttacccttgcggagatctggctgtaagtacaagaactcttacccttttgattgctgggctacgggaggtccttgaaattaatggggagtcgctatcatgggcggccccaccttggtcaaagattcctcctgagtctgcagcaccagacctcctccaggtctctgtgctctccttcagactctttcccacaacaactctacacagatcagagatccctttccagaaacccatgcatagagttgtgttattttggaaccacttctggtaccaaaaactccattaggtttacatcaataaaacagaatcactaaaagtactatggagaggaggatttatgacaggagttagaccttatataaatgtagggggagctgaggaagagaaggtctggaggggagatatagctaggcagatttaattcatgattaatgtgaccgtgacctcttattctactcaaaggagagcatatgatttcaacaaaaaaatattgattttcctttgtaaaagtttgatccaaatagtgagctatttttgtcccataattgtcttaagttggctaatggtggaacaaatccgactttgatttccttgaaagaacaggaaaaaaaccgtcattcatatacagtcttacaggctctattttatggaggaagcataataaataggaaagagaaaatcagaattctcttctggaacctacattgggactgtcctcagagcaggttgtgatgtgaggaatcaaatctacaggggtatttcgcagcttggagcgcagcagactgttcccgaccccatgcatttgggggtgagaccagagacagttgaaaaactatggaatcttgacattctgcactctcaagcctggcctctccctgaatttcacagattaacatcagaccaatttattccgactattaaaagtattagaacaaaaaccaaggaggaccagtgagcagaagcaataaaccattaaaatggacatcctaaagatttaaaattttgccatcataagatgtgaacgtttgaagagctgcatttaaatgaatacaagaagggactgaaacaagaatacacacaaaaaagagacggcccgaaaccatcaaaaaacattaaagaaataatcaaatagaatgtctagaaatcattacgattactccacaaaacaaaatggaagctaaacagcagattcaatgcttctaaagagattgttagcaatatcaaaggaggatctcaagaaatcacctagaatgcagcacagaaaattaaatgtaaaatataaaaaaagtgaaggaacaaggaaaaaatgaagtttctagaatattagaaagcatataatgttttattgaaacttttcttactttcttgtatataactgacgtttcagaaagagaaaataaggcaaatgatctgaggtgattgtgtatgtgatgctagctgagaatgttcctgagatgtttgaggaccgaaatcctcgttcaagaattcagatgaattgcaagacaagtaggcaggtccctgtgaaactgcagaccataaatgacaaagagaagattttaacagcagtcaaaagggaaagataaataacttccagtggaatagaatgaaagaaataatcaaagtcaagaaagaggattaaaaataaccattcaataagaattgtagtcctcatttattgaagattgagattgatttaaaaaaatctataggacaggaaagaaaatatggaaaaccaaaagaattctgtgagtttgccaccaaggtatgttttctgaattatagttaacatgggtgggaaatgatcccagaagaaaggcatgagggcagtttgtgggggaacccatgtgatgggacaatcccattgggcacgtgtgagtgtgggaatggaggaggctggggcatgaatgggtatggcagagggcaccctgacttgcaggaaagacaatgagctcactccttggtgcctggtgttgggggcactgttggtgcatcctacagtacgtacccagcagacagaggagcgtctctgggatgagaaggtgaacttggagatgcagtgaggcctctgggtccagacagcataggtcaaaaaaagagaacctgatcaaagatgactgaaaatagaaatagagcaaaaaatgatatatgtgcctgatgattcatttgatgaaattaactagagaacatagtgtacatgcctccacagacattttaaaatcagcattatttatctataaattatacaatataaacattacacatgttaaataaacaaatcagtgagctatatatatatatatatatatatatatatatatatatatagagagagagagagagagagagagagacatatatatatgggttataaggttatatatgtatatccttataaccactatccctatacaaatgtctctatcacccagaaagttctctcacaccccttggcaatgactgtttccatctctgacaaccaaatgatatgatttctatcactggagaatacatttttctcaaaaaatctattagtaacattttaaaacctgtatcgactaatccttttttaatacatacatttaagagtgcaaggtggtcctggaaagttttatggtttaaaagtaaagttctgtgagctacctgatccatgttagggacaatcctatctggagatagataagatgatgaaatagcctccaaattactctccagctggtggaagctcattctccaaaattatttattcatttttattgatttctttactcatttactcactcattcaaattatttattttataatgatattgtgacaacaattcatcattttaatgaaattattttgagttcccatctgacacatacttaactggccttcaggttcacacactgaatgcaatgggactaaacaaaccatggtaatagtgactttgttaagagatgatgtcacatgtggaaaagggttctatttgcttttaccccaagtatccaacccataaaacctgagctttgagctagaaaatctccctttttgttctggccctaccctgggcaccaggctcctgcaccatgtctccttctgggttctggcccagagaagttcttggcacagttgtagcacccactcatgggcttgctggatcccagctgtgagtgacagtagcaggcccccctttgctctgactttaatttctgtgtccttctcaaataagccctatagatgctgagtggcctggacccctgccatgtgcttgggctgaaagaaaaacagcacctggggaggtgagcgggagcaaagttgaaggaaatctagaattgacagtggaaggaggagatgaggaatatcaattatggcattaagtaccagtgatagtagcaggactgtatcttatttccttaaacctctgatacttgtacagatagcagctgaccacaaccttgaagacctatttggactcaatggaaataatgcatgagtggactgtatcagttgcctctattaccacctcatactctcttggttccacctttgattccagccacagctatgatgaacagttctatgcagacactgacctgctccacagttaccgcacctcaccttcaatgtggccacgtgttcccaaaacacgctgttgctgaggcatgagacacattggtggtctgcatggcgcttgttcatgcacaatgaagtgtgagtgagttaatgtcctatggggcaattctcaaccactggagaatgagaactggtggataaaagccttggcattagtctcaggctcctagaaaggcctagtttgatagccagccacctatctatagagatggcccgattaatatgttttcctttgtattttctctgctttttgtttctctgattcagtatggatattttcacctgacctatcttccagtttatctagtcttttcagctttatctatccttctttaaaatatatatatatatatttttttttcctaaattttatgtatttcatatatttcagttctggaatttccacttcaatcttgactacagtattcagttgtctgctaaaattctccattttgtcatttcctttttgattatattaacatcagttattttaaaggcagtgtctgataacacatctctgttggtgtctatttcttttgtccgctttcttttttttaatttttggtcatgcaatgttgttttctcacacaatcaacaattcatttgaatgctaggtattgcatataaaaattacagagataatgaggctctgaatgatttcatcttcctcagaaaggattcatgtttgcttctgctggaaattgtagcagagacaggtcaccttaattgagttgatgactgagctggatcagagctgggattcagccttcctgatggcttctcaactttgctattagccattaaacttccaactagatttctggagtattttaccagcttattaaagtgtaaattacataacataatatttgcctactggaagtgtgtaatttaatgagttttgataaatttgtggagttgtgcaacaatcaccatgatctagctctaaaatatttcatcctccctacccagaaagttccttcgtgctcattttcagtcaatctctgcttctacccccagcaccaaggcctggggtctttgccaggctcctctcctactcagtagtcactgaacgtaaatgttctccaggccagaaaggtggtggatgctcctcaaagcctttggcccatcagtcctccctttcttcttagcttctcagccatcaaatgaaattgacaaatgaatttaagggaaaagtaggtttttttttttttttagatttatccgttttctatgatatccctatcttttacgctcttactgccccagtagctccaagtgccttcaaacatttatgttttatattttgttaagcttttctagttgtttttggtggaagtgttgttctgccactatccagtctattaactctgaaagtcagtttttatatttattaaagatgaagtgcaattgagttggtaggtttgtatgtttgtattatggtggaaacttcctgaagagagtgaggagtgaagcccctctagtctcccgtcacgtgtccctaataagacctctaccaccctgctgcctttgttccactactggactgagccttgacacgtttgaccctttggccacaaggaggagctgtgactctgctgagattcagagaacttggaggaaggagagacaattctctggatggcagagggttaatagaaagattgagtttatttacaacaagggaaaatgtggtctgcaaagaatgctagtcaaggctctaagtgtgagggttaaatacagactattcattttgctttgatatgcaggcgcttttgtgctatggaagagcctggactgtcagacttccactggagcgtgcatgggattagaaaggacaaggcatgagctggggagagtgggagcccacaagcagacacagatggaggaccccttcccaagaggaataagagaggctctgggtgctgggccgttgctccagctcagcccagtacagctgagccctgccatgaagtgagtctggccggccaggggtcccttggggatcttgcagagaataataactcagggaaatcttcttatgagaccaaaggtgacctacagccctgttctcctcactctaaattatcggggaattaagctagaaagaagttttttcttgttcctcttctggatggtcctctgagtttttggagcaggagctccccacagtgataggaaacccctctcctaggcctgagcaaatgtttctatcaaaacagcatcaccagactcccttccagcttccatttccaagttctttccctatctacgaagaaccgtggaagctagacttgtccagacgtcaaaggatctgatgatgccaaaacacctggagataggaaagaaggtggcattgacagactgccaggatgcacacctgaaacgcactttgttttcactacaggctcgtgtttcacattttaaaaaagcatttggaacttccctgacttcttggaaatccaaaaatacaacaaagttacattttagtagactctagtcagtcatctggcaggaaaaagcttcaggatataaataaaagtataaatagtagtatatacatatatatactaattatttatatataaccttacatgtatatatactacatacatgtatgattatgtatacatatactatacataatatagtgtatacgatacatgtactatatacaatatatactatattatatatattctgtattacatatagtatatgtatatgcatgtattaccatatatgtatatatacatgtatgtatacgcatatattactatatatgtatatatacatgtatgtatatgcatacattaccatatatgtatatatacatgtatgtatatatgtaggctggatgactagagcctacatcaaatgtaactttgttgtattcttgaatttccaagaatcaagggaaatttgaaacgtatatatccaagtatgtagtgtgtgtgtatatatatatatacatacatgtatggtaatgtatatacatgtatataatatatactacatgtaatatacatgcatatattatatatacatgtatatatatacatgtgtatattatatatacatgtatatatatacatgtgtatattatatatactacgtgtaatatacatttatatatacatgtatttatatataccactaccaaatacatgtgtatatatatactaccatacatgtgtatatatatacactatttttatatataatatatactacgatacatgttctagcatattgcctgaagtaaaagtccagccaaatagtttaaaaggaaaaccatgagccttcctgtgaagattaattttgcatttcatcttgaaatggaacaaagaaatctactgaagatagtcaattcacttctatatacggaagtctacatttatcagctttctacagtatgagcgactttcaaatctcctaaaagttacacaaatcagaatatgcagaacacacatttctaagctcaatattaaatatgtaaagtgactaacttgaacgtaagagttggacgttcagggtcctcctgtgatttcttcattcccaccatcacaaaacatctacaccttcttctcagtaacaaaaatgagatgacataaaatcatttttcatagttaataaataatacctatgcatcatgacattgcattgattttttgttaatggttgttttcaaatgactataaattaaacatttataatctatacaatagaaataataaatgtaaatattttaagtggatacatgagattttagtagccaaacaggctcacacctgtaattccagcactttgggaggccaaagtgggaggatcacttgggcccaggagttcaagaccagcctgggcaatatagggagatcctgtctctgtattttaaaaaatagttatacagaaaagtaacatgaaatagtctgcaacaggatgtcctatctgggtttgatctgaatttccatttagaaaacagacaggcactggtccatctgcgggcataggttctcatgaattgatgtgcatgttgacttttgtattttgtcaaagttaaaggagatattttgatcagagtcagagccacaagtaactagcaggaaactgagtgggatggaggttatgccatggtccttgcttccttgcagagctaagaaaccagttgtgagcaccagcgaaaagagacaaagtcagatgaaactgaaatcttcatgggactctgtgcccaagaaaaccagcttgacaggattgggcacaagagctattccttccatcctacgctgccagagcacacagcacagtttcccccatgagctcttggggagctggaggagggagatagctgtgctgggcggagtcgtattcccatgggaagtccaaaaagtagaggcagggatggaggttttccttctagaaagagtggaagattttgtttacaaacgtacccatacacatgcctttctcccgaagacccaaactttggggaattgcttaaatataacaaggaggttaaatattggacagccaaaaataggaccgaagccaatctcttctgaagtaggtgtagtcactgtgcattagtcagatattcaaatgagcaaagattcaagaggaaaaaaaaaagcattattggaaaaggaagcaaaagatcaagagaagaaaaccagcctgactctgagaggagagcccaaaagggagaggaagggaggaggtcctcagatcccgggtagggagcagggagggaggggtacaggcacaggaatgactgtcagagacacatcctggaggccacaagtccactctctcaactattcccagaaattccaaaaactcctttaaagaagccagtgcagggcatgaaagggaggagccatgctagaggagatcctgggaatgggggaatgattacaggctgtgacctcaatggcacagcacctctcagaggcagtggaaaccacagcctagtcttctcaccactgcagaccagaatcctgccctgggccttgcctggtctgcctgactcggccatgggctgcaggctcctctgctatgtggccctctgcctcctgcaagcaggtgagtcctgggcccaagtgacaagatcctgttggagtccccgagccttttcaccatgacaacaacaggaggctacctcctgggatttgcctgaattctgcttctttcctttacagatccactggacacagccgtttcccagactccaaaatacctggtcacacagatgggaaaaaaggagtctcttaaatgagaacaaaatctgggccataatgctatgtattggtataaacaggactctaagaaatttctgaagacaatgtttatctacagtaacaaggagccaattttaaatgaaacagttccaaatcgcttctcacctgactctccagacaaagctcatttaaatcttcacatcaattccctggagcttggtgactctgctgtgtatttctgtgccagcagccaagacacagccttacagagccactgcatccctgtgcacaaacctcccggctcagccaggaagctgtgggccgtgtgtgcacctgcacccaaggctccagtctccattccctgatggcctctgatggagtttcagtctgtagtacagcctctgccagtgcacctgatgtggcaattctccattttatgtacacagaactctcagaattctgtttatcagctaaagcaggggttcacaacaaagtcagcaaagtatcagagctcaactaacaaaacaggagcctgtcccatgcactgaaggtctttactgatgggagaagccatttcttgtctttgtctgctgcacatatgggtccatattttactaatgttatgattataaacacactgtaggcaaaaatggttgatgagcctaagcataaagaagaggggaaggaaagtatttctaagatcaagagacaatttggattatcagtgagtattttgtttgacagagaaatattttgagaggcgtgaaattccatggcaataggtaaactggaaagtgttgaggagaagtcagtggaggcagccttgtgcattgtcggctccttctcttcaagaagggtgaccagcaagagtttctcccaattctgatgagtgtcatcttgaactctcctcaagagcaggtgacagctggatgacaggggatattgggagacatggaaaggaatttggacacaaatccctaggcagtggtgagccactggtcctactccaagtgaaacaacatgatgaaactgatattttggtacaggaacactggtagtagtatggatcagaaaagagatagatttttgggtggcatgaatgattaggagacttctaaataccctccatgaaagactagaaatcgtttatgtaaagcattgtggacgacataggcttgaggctctggattatgttatctcttggaaagagtgttgggttttattctgggacggttgaatgtaggacttgctaagttctatttcagctttgcccttcctcttagggagccccagcctgtggtcatcattgctagtgcatggccttcccagggtcttagtgggaatcacagtgtattcgccacatcactccactgcaactgggtctgaatgccctggctcttctgaaatctctgcccatgtcttcagccttccagaacttgttctctgctcagccttctggtctcccacccttctgcatacacaatttaggatctgactcaggaaaaaaaagggggttttcttacatataatttttgggttcctttttagtactctgtgtcctaaatcccacgtgtcttggagtcagttatgtcctatcttcagtcacatatactactgctatttggtacagacatgtttacttgactttacttcacgtttgccattccactcttcactcttctttcttgcaattcagacagtcctgaggtcattttccttcttcagatccatcccatattcagatgacttaaaatcacctgtcacccatgctgtgctttgagaaatgtttatgttagctactgacatcagggcagtcaagcctctcattgtcattgttattcaaggtaggttgaattccattaaaaaataaaaatccttgaaatttggtttacttattgggaaccacacaatgatatcaaattctttttaattcaattttttttcttttgtggtggaagggccaagaattgtttccttgctgaagcagactcctatcataataatttgaatactaacaacgttattttaatactaacaacgttaacctttaaatcagattgatgttaggttcttatctaagaatgaaatatatccaaccgtagcaggttgaaggtctctcatatatgtaacctgttcaggacgagataattcaaccactttccttaaactctgatctaaatgcctttacattctttgttttaagggccacataaaaatactctgaaacaatttacacatcagaaaaatgctaatactttcctcctggcccagcacatctccaagttaaaaaaatctctaaattctcaacccatagtttaatcatggtaactcccttctacccccaacatagatttttatgtaactgatttgtaactacaaccctaaccctacaatcacaattgtcattacaaaatactaacaaacatgtgctattaccaatagatggttaaaatcacttagggattatgaatcatgtcattcttgtatttatttgtacttattctttgtgtttatttattatgtcagcttcaagctgatttccctttcccttgctccccacaccttttgttgttccttttcagcatcctgtgtatgttagctctaagcccagccaagccccatgccctccacttcagggacagagggtggctcatccctttcgtgctccctcagctccctccccagtgcctggtggctggttggcatcacagccatgcccttgaataatgggcgctggtccacactgcttctgtggtcatgcagtcatcctccctccacagagctgggccaaaaagggctccactgcccttaggcattgagggaatggacattctgagtggcactgtcttgtgtgatcccacaggacagaaggagattccatcaatgggagtagtctgttgctgagagggatcctgaaagatagggggacagagacacactgggaggatccacataaagaggaagcagctgagaacaaaggagcccctgccagaggaatatccttggggagtaaaaagctgactctgccctttctccccagcccattcatcccagcccagacaattcaaatctaccttctatcaggacctagaaaggatgtaaaacggctgggtataaatatcccctgggtctggggaaactgtcaggagcagtgacatcacaggaaaaaccaccaaccaaggccaaggagaccagagcccagcacctcacccagaggaccccagtcagaggccccatctcagacccgaggctagcatgggctgcaggctgctctgctgtgcggttctctgtctcctgggagcgggtgagttgggttcacatcagctgtccttgaattccaagctttttccttgtgatttcagcaacaagcctcctcctgggctctgcctgaattttgtccctttccccccacagtccccatggaaacgggagttacgcagacaccaagacacctggtcatgggaatgacaaataagaagtctttgaaatgtgaacaacatctgggtcataacgctatgtattggtacaagcaaagtgctaagaagccactggagctcatgtttgtctacagtcttgaagaacgggttgaaaacaacagtgtgccaagtcgcttctcacctgaatgccccaacagctctcacttattccttcacctacacaccctgcagccagaagactcggccctgtatctctgcgccagcagccaagacacagccttgcagagtcaccgctttcctgtgcagaaaccttaggggccctccaggaagctgtgggggccaccaaagccttcggtgaacatttcctgcaagagccccgacagaagattcagaacatcatagcacctgctcattcatccatgtggcaacgttacatcctatgctcatatttagagtgtgggttttctttagcgtgtgactctgccctgttaactgatttgaaaaatgataaacacattcagatctagtctttttaaaatccctttttaaattgtaaaataaagcaagcatgctataaggggattgtttggtttaagatgttataagaccctctcaacaaccacctgcgtcactacagagtcataccctgcactggaccacagagtgtcctgtgaggagccaagttcttctgacactttatgcctggtggtctccatgcctctctttctcagtaaccaggggtccattctgtcataggttgctgacacccaaggtcaagcagcactgggtttgggggaatcatagaggcaacttccaggcaagggtcccagggcgggagccagctggagagaacagtagacaactgagcttttggggaatgggtttgagaaatatctgtcaacccaattctattattctatcttccatcttgtctcttctctattgttcttatttaaactccaagctagagcgtaaattccagccctgatcaaagctccatatccctcacagacaccttctctgaaccccgcaggcagcaaatgtgcctctgtccactcccatttgtgtgggcggtaagccacccaagtcctgaggcaagagaccgagggcacgagctgttccagtataataaagaaaatatataaaataagaatagttatactagtaatagattatagatatgatggtatacaaatattatgaataatcagtttgtagcattactcttcattccaatattataataatccttgctctacaattataacctaggaaaaaccaggccatacagagataggagctgaaggggcacggtgagaagtgatcagaagacaagagtgtgagccctctgtcatgcccagacagggcccctagagggctccttggccttgtggtaaccccagagcctgggaggaagccccttgcctagaggaccttggtctagccttagcgtcagtgcctagaaaaagcacccattacttagccgaccaggaaagggagtctccctttccccgggggagttagagaagatattgcgtgtggctaggcttggtgctcacgcctgtaatcccaacactttggaaggctgaggtgggtggatcacgaggtcaggaggtcaagacgagtctggccaacatagtgaaaccctatctctactaaaaatacaaacaattagcgggttgtggtggtgtgtgcctgtaatcccagctacttgggaggctgaggcaggagaatcacgtgaacccgggaggcagaggttgctgtgagctgagatcttgtcattgcactccagtctgggtgacagcgtgagactccacctcaggaaaaaaaaaaaaaaaaacgataccgtatgtgtgaatgtgtgtgtgcctatgtgtgtgagtgcgtgcatgtgtgtgcatggatgtgtgtgtgcatgtgcatgtgtgtggatggtgtggatgtgtgtgtgtgtgtgtacgtgtacatgtgtgtgtgttcttgtggaaactcacccacatggacccaggttctctgggtggcattactgagaggtgctgggtcactggtagagctcataggcagttctggggagtgacaggaaatgtcacagccaattgaatctgcctaagttacagctgatagggttgtttatttcaagattttgtaagttcagaaatagatttataaaaaatccaagaattttctttctaaaatgcactacctaaaacttgctgataattcatttaaatacaaaatatgagaacatgggtctgattaatcaaaaggaacgattgaatacagtttccaggatagggctgtttgatatcttcacactgtttaaatctgtggcctgtatttttcaggctcctctcgtccatcctagcatactaattgcaatgctgtaacattgtttattttgcaatcaaaatgttggttaatgcttgcttttgctagctaaaggtgaactttcagatcaaccctatattggcccttctgggcaagtatacagagggtgtgtgtgagagggtggggattgcaggagtgagggcagggcatctctcttccttctctggacaatcttgagttcatcaggccaggtgtgaatccgtgagactgtggatctttggccacttggaggcgctgtagctccacgatgctgtaagaaaccctgggcagggctggagagtggccaggagaagagggttgaaggggatgcctggctgcctgctgccatcaggggccctttgggattccctgagtgggcctggacatgtggaattaagcacagacccctcactgccaaagaagggtagggatgctagagtcctcagtttgtaccaaggagggagggtgtctgcctctgcgtgggcagtggagggtgaaggggctggggtggcaagggctgggaataagtgtcaggcctgggacagggaggacacaggaaaggcaggtgtgatggggcatgtgggggctgtgctccacccgctccacctttagtttcagggctgtgtaagacaggaagatctcatggagtagcaaagcctgggccctgccaatggttgcagagtgcaggggtggccggcagagggagtaactgggaaaggccagttccccaaggaaatgccagaaactttcctgccccattcagaaagtgactgtgaggcgggtgcttccagccagaggggctcaggccctgctgagctgacagcgttttctttcccagacattctctgctgcttctatatgtgatctgttttaatgctcactgaaatcacaagtatttattattttgactgtttttgtatctgagggaaggcagctgtccctggtctcatatttaataactggctgtcgtgtgctctccaacacctctccaccctccctactcagtacatctgtcccgtcatctggcttcctctctccaggtcccattagcaggaggggaaggtcatgcctcctatgtgaccattagaacctcttccttgacaagtccaagaaacacgtgacttccgggccaagcatatccattcattcttcattgcagccaaaagaaagatgaaattttctaccctgtagactttctgtcactaatgcaatgtaccttgaggaaaagtaacatgaataactgttattcattagttaatttcttttatatcctttattcaataaagtctttgagaccctttctttgtatattttatgacataaaataaaaaatgggaaaaattgtttaataacaaatatttcttactttttagagtattaaggcttaaatttattttgttttattttagttttatattcaaagtactttactcagtttctgaattacaaaaatttccctttctttctctgtctctctttagctacctccctcattttttttgccagcattttaatttaatgtggtaggaacatgtaacatgagatctgtattttaaatagatttttaagtgtacaatacagtattgtaatctacaggtacaaggttgtacagaagctctctagctcttacttatcttgctgaactgaaattttatacctgctgacagcaactccccattttctccattcccagcccatggatatcaccatttttatctttgctttcatgagtttggcttttaggtagcctgctataagcagaatcagggagtatttgtctttctgtgccaggcttagtcacttatcacagtgtcctgcagctttatccatgttgtcacgagtgacggggttttcttctttttaatgcttaataatataccattgtatgaatataccacatttatggactttgactgtttctatgaaactgtctgtcacataagtgggagagtcatttgcagaactgaaagcttggattacatgaatgggcattcacatttcaattctactccatgggcaagacggagaataaaataatgattccatcatttactcttactttgctatacacaaaatagaagtcctgcttttgggaagtttcagttatttagaaattcgactgtcagaagaaaaccctaagacacaaatgcttttctcattgtacacgtgagagaattggctcattggttaaataacctgaccaaattaaatagctattaggatgcagtactgatcctccaaccctgcccagtctaagttccatgtttatagctctatgctataaaatatttcataaagctgccaacctagaaaacattggaaagttttcccctacatcccctttaggcctgctggctctaatagcatcatagtcagagatcagtttaccctggagatggtggagtagggaaagaagtctgaagaggcaccatgactccccgccctgactcccactctaacaccagctcatcaagacctgaggccagttcttaacgggttaacttaagtttttcagtttttttttacctataaaatgagactactactgtccatcagcagagttctagataacctttaatggcataaaatatctagcatatagtagaagcctagctattttgatttcctttgctgatctcagacaacctcgtccaccacaccaatgtgcaaagacagatatggacacattctgccaagaaatcttaggttgagggctcagaagtcacagaaatggaaatatatatgcctgataattcatctgataaaattaactagaggatgtagcatacatatctcctcaggcatttaaaaatcaacattattgatctataaagtatatgaagttaacaggacaccttttaaatgaacatatctgtgatttttgagcaacatatatctatatatgcaaccccacctctatgaagatgtatctgcatcacccagaaagtccctcactcccctctgcaatgcctctgtctgtcccagcaaccaatgatgtgacttctatcactggagagtcgttttgttggcaaatatttttaatgcaaatgtcaaacctcttctgaatagtcctgttgaatacatagctaaatcatcaaggcagggaggagttcctgggaggttttatggttttagaagtggttgaagctaggtgagctacctgacccatggtagggacaattctatctggagatggatgttgtgccgaaataacctcaaaaggtcttttcggctggtagaagctgattctacaaaatttattcattttcattcgtttattttctcgtcaattcattcaatcaaacaattttatgttacgttttgacaaaagttaatcatctttaaggaaattattttgagttcccatcagacacacatgcagctgggctttgtgttcacacagtgagcatgctggggtcaagcaaaccatgatcacagtgacttcattgacagatgatgtcttattgggagaagggttctctttgacttgaccccatgtgtccaacccataaaacctgagccttaggctaaaatccatcttccttttcttaccctgccttgggcaccaggccactgtgctgtgtgtttctctgtctcctgaagcagagtcctgggcgcagatttggaacctattcgtgggcttgtttgatcccagctgtgactttcagtaccagggggtcctttgctgtgacttgaatttgtgttttctttactcttaagttccacagatgctgagtgacccagaccctggtcatgctcttgtgctgaaaggaaaccagcacacggggaggtgagcagtatatgaaacaaaatcatgtatttacaaccagtggcaagacttactggcaggtgctttgttcaaacactgttaggaatttgaagatcatggcagtagaatgtgaaaccaagtgcagggtccttccaaatgcaggcctctgtgcaccaaagatagacttttggagctcattttttttaaacaaaaacggaaacaacactctatgttcatggctgtaggccatgcgagaatatttttttaaattttaatttaatttttatttttccatatattattggggtacaggtggtatttggttatatgagtaagtttttagtgatgacttgcaagactttggtgaacccaccatctgagcagtatacactgcaccatatttgtagtcttttatccctcaccccctcctgctgtttccccaacacttccccaaagtccgttgtatcattcttatgcctttgtgacctcatagcttcgctcccaaatatcggtgagaacatgctatgtttggttttacatttctgagttacttcacttagaataatagtctcccatctcatccaggtagatcattccaaatgctgtttattcattcctttttatggctgtgtagtatttcatcatacatatatgatatatatatatgatatatatatgatatatatatcatatatatcatatatatatgatatatatatatatcacagtttctttatccactcgttgattgatgggcatttgggttggttcctttttctttatcactaaattaatggcagcaataaatccagaacattccttattaccctaaagtcagccctgtctcccaaactcccttacacatcaggacacctttgtgcccatagatcatgggcagtgcttggcagccaccactgtgcacacagagagggtagtcagtagcgttaggtggttctgcctgctggggtctcaccccaggaacagaaagcaggagccctgggtggagctgaaagtgctcatctgggtttgtcaggagtcccatctgtcagtgaattcacaagaaacagaacaaaacaactcttccaatgttgatgagcctgcccctgggatttggaaagctaataacagagaaaaccaatatagacaaaagattttaaacaggactatcggattatggtcatttaagcaaattagaaaaggatacttgaaggagtatttgggacacaggaatcaaaaacaccaggaagacatgaggagtttttccaagattgtagactatagcaatacttagataaccaataccagtgtattaatgagtaattattagtattattattttgagatggagtcgcactctatcatccaggctggaatgcagtggcatgatctcggcttactgcaacctccgcctccctggttcaagaattctggtgcctccgcctcccgagtagctgggactataggtgcacgtcaggatgcctggataatttctatatttttagtacagatgggatttcaccatgttggtcaggctggtctccaactcctggcctgaagtgatctgctctcttcagcctcccaaagggctaggattacaggcatgggccactatgcacagccaagtaatttgtatcatcatgggaataaaaaatatacattgagttacaaactaattaccaaaagatatttaaaaaatggtagacttgcatcgattcagacaaaggcattcttcccatccaaactgttcactggtgcattgatcttgaatttgaccatctggggaaggggcgtggcctctcctgacagcaaggctctggggcccaggcagggagaatgaggtctcagaatgacgcccttgaaagacgtgttcccttttcaccaatgcacagacccagaggacccctccatcctgcagttcctgccatgagcctcgggctcctgtgctgtggggtcttttctctcctgtgggcaggtgggtcctgggcggggccccttgtgtggatttcaaggcccatcccctttccactggagctgtagcatcagctttgtccttctctgcaggtccagtgaatgctggtgtcactcagaccccaaaattccgggtcctgaagacaggacagagcatgacactgctgtgtgcccaggatatgaaccatgaatacatgtactggtatcgacaagacccaggcatggggctgaggctgattcattactcagttggtgagggtacaactgccaaaggagaggtccctgatggctacaatgtctccagattaaaaaaacagaatttcctgctggggttggagtcggctgctccctcccaaacatctgtgtacttctgtgccagcagttactccacagtgctgcacggctgtctcctctctgcacagaaaggcaagggaaggtgctgccctcctccgcagcacagattcagcgatgcccttggtcctagcaccgaaaactttggagccccaatgggcccgggcggtgcgagccttcatctgtgccaggtgcctctgcagtcggtctcggccaggcctggatcggtcccaggacctcagatgtcttccttgttgccctccggtctttcctctgaggtgtccttttgggctagtgccaggggtttcccagctctgactttcctagtcattcacctgagtctgaggcctcctaggtgaaataggatttgtatttcagatccatctagactcccgtctctacctgggtaccacgtgctttcctctctctatgatttttcctcatgttgaaccctacggtggtctcagctgcagcctgcatttcctatattcacagtcgccctccaaggccttgctgggtttctcctccccgacctccctgcccttctctactccagccatgttgagagactccaaagtccatttcctgtgccctgggctggagccttcctttctgtagtggtcaacacctacctgtgcttcagatctcagcatcatcagccctagtgataatcaccattatgcttcccttggctcccagctgaggtcagtttccctctcataatctctcatggtatcatgtgtctgttaatcagtagaatttagcacagttggaatcttccaagtactttaaaccccatgaaggccaaggctatgcctgggttataaatcagcagctgagcctggcacaaggggagatgcatttcagagaatggatgagtcagtgatggagtgagtgatgagtggatggatgaatccataacaggagcaccctagatccattttacccttgcggagatctggctgtaagtacaagaactcttacccttttgattgctgggctacgggaggtccttgaaattaatggggagtcgctatcatgggcggccccaccttggtcaaagattcctcctgagtctgcagcaccagacctcctccaggtctctgtgctctccttcagactctttcccacaacaactctacacagatcagagatccctttccagaaacccatgcatagagttgtgttattttggaaccacttctggtaccaaaaactccattaggtttacatcaataaaacagaatcactaaaagtactatggagaggaggatttatgacaggagttagaccttatataaatgtagggggagctgaggaagagaaggtctggaggggagatatagctaggcagatttaattcatgattaatgtgaccgtgacctcttattctactcaaaggagagcatatgatttcaacaaaaaaatattgattttcctttgtaaaagtttgatccaaatagtgagctatttttgtcccataattgtcttaagttggctaatggtggaacaaatccgactttgatttccttgaaagaacaggaaaaaaaccgtcattcatatacagtcttacaggctctattttatggaggaagcataataaataggaaagagaaaatcagaattctcttctggaacctacattgggactgtcctcagagcaggttgtgatgtgaggaatcaaatctacaggggtatttcgcagcttggagcgcagcagactgttcccgaccccatgcatttgggggtgagaccagagacagttgaaaaactatggaatcttgacattctgcactctcaagcctggcctctccctgaatttcacagattaacatcagaccaatttattccgactattaaaagtattagaacaaaaaccaaggaggaccagtgagcagaagcaataaaccattaaaatggacatcctaaagatttaaaattttgccatcataagatgtgaacgtttgaagagctgcatttaaatgaatacaagaagggactgaaacaagaatacacacaaaaaagagacggcccgaaaccatcaaaaaacattaaagaaataatcaaatagaatgtctagaaatcattacgattactccacaaaacaaaatggaagctaaacagcagattcaatgcttctaaagagattgttagcaatatcaaaggaggatctcaagaaatcacctagaatgcagcacagaaaattaaatgtaaaatataaaaaaagtgaaggaacaaggaaaaaatgaagtttctagaatattagaaagcatataatgttttattgaaacttttcttactttcttgtatataactgacgtttcagaaagagaaaataaggcaaatgatctgaggtgattgtgtatgtgatgctagctgagaatgttcctgagatgtttgaggaccgaaatcctcgttcaagaattcagatgaattgcaagacaagtaggcaggtccctgtgaaactgcagaccacaaatgacaaagaaaagattttaacagcagtcaaaagggaaagataaatatcctccaggggaatagaaagaaagaaataatcaaagtcaagaaagaggattaaaaataactgttaaatcagaattgagattgataaaaaatacctacaggacaggacaagaaaatatggaaaaccaaaataattctgtgagtttgccaccaaagtatcttttcagagttatagttaacaagggtgggaaatgatcccagaagaaatgtatgagggcagtttgtgagggaacccatgtgatgggacaatcccgttgggcacatgtgagtgggggaatggaggaggctggggcatgaatggggatggcagaggggaccctgacttggaggaaagacaatgagctcatcccatggtgcctggtgttgggggcactgttggcacatcctacagaacgtgctcagcagacagaggagcggctgtgggatgagaaggtgaactcggagatgcagcgtgaggcctccaagtccagacagcatgggagcccaaagcgatgtcccatgcaataacgttgtttacaaggagcttataaatatttaaagtagtcacccaagtgtggtctaatataaatcctgtgttcctgaggtcatgcagattgagagaggaagtgatgtcactgtgggaacttccgtgtaaggacggggcgtccctcctcctctgctcctgctcacagtgatcctgatctggtaaagctcccatcctgccctgaccctgccatgggcaccaggctcctcttctgggtggccttctgtctcctgggggcaggtgagtcctcagacaccaaccattctcattgtgtgtgtgtgtgtgtgtgtgtgtgtgtgtgtgtgtgtgtgtgtgtaggggtgggctgtgtgcattcgtgtgatgactaaaattattttcctcattctgttcccaactttgtctccacagatcacacaggagctggagtctcccagtcccccagtaacaaggtcacagagaagggaaaggatgtagagctcaggtgtgatccaatttcaggtcatactgccctttactggtaccgacagagcctggggcagggcctggagtttttaatttacttccaaggcaacagtgcaccagacaaatcagggctgcccagtgatcgcttctctgcagagaggactgggggatccgtctccactctgacgatccagcgcacacagcaggaggactcggccgtgtatctctgtgccagcagcttagccacagcatggcacagtcgcctccttcctgctcataaacctcatccttctctctccttgcagctcctagacacccttaacagaggcttctctttgcttctccctccccatgggaaacaagtagatttggacctcagcttgtcctttgggtagaaagagaccacagatttacccttaagacacagtaactgtaaatgtgggtggtggaagcaatcgtggcccaccgggctattggagtcctcagagccagctcattgctctaaggcaagcactgggtgtcttagccttggccttcagggctgggacacacagtcttctttggggcctgggaggttgctgcccacatagagaagcttcgggcatggctgaggaacaggtgtcttcccctacatgtgttggggcatctgcaaggtctgaagcttcatccacaagaacattctttcttctgaagcctcttctgttacattggaagttttctgcaatacaagagcaaaccattcttcctgtttgatttaaaagtctttgtggcttttgtggccattacttggtgaatacagccaagataacaataagacttcgtttcttctgcctagtgtaagcaatgcgagttctttattttgttttcatttaccactgctcctgtcctgagagactgaagcatgcgtccactactgctccagtatcaacttggttccctaggaaatcgggtttctagaacctgaatgctgacaaataagagttgtgtacatgtataccatgcaacctgcgtttaaaaatgtatgtacatggtgaagtgactaaatctagctaattaacatatgcagtacctcaatccttatcctttcctgtggtgagaatacttgaaatgtactctgttagcaatattccagaatacaatccactgttactaactttagtcactgtgttgtacaatagatcttttgaacttcttcctcctatttgagtgaaattttgtatcctttaaccaacatctccccagcaccccatctccatcccaacctctggtaattgctgctctagtcttttgatttgaaataatttccctgaggtctttaacttgagaagatggagttttaaaaacaataatgcttatattacttttgttttgtttgttattttacatattgcaatatagtgtttgttgcaaatataaatgagtatactgtaataaaaattcttcacctctctttgagtgaagctacatttcacatatatgaaatttcaagctgtggtcagagctgacatgattatggatcatgggtttctgggagtcctcagagacagccctatacacaaaggttaagatagattatcccagacccagccaggacagaggtgccctgagtcctgcagagctggttggggaattatagttccctaaattcacttatcagaaattgtggtagctcagataccaaatttctttctctagcaaatgatgatcgttggcagggattgttctgaatccattctaattgttctatcaacagatcattccttttttagttgccctgtgtgtcctgggagtgaataagtcccaggcacagatgggaatttcctgaccttaggatgctgttccaaggacttccttgctagaccctgtctccagcttttcccacctttatcctcatgacccctaagacaaatggtcctaataatggaccagctctgaaacttaagattgaacagaacacaaaccacaactgtaaacactgatgctgaaagaagtggtaaaaaaaggtgagcagggtttcccacctgcactgagagttaacatacaaggacagcaaagggaaggttttattaataagcaaacaagaagcaataaaggccctgctccattgaatgtaactaatctctttgagttaaaaaaggagcacgtcaataaaagtatttcaaatcaaagtctagaagtttccaaaccagccagcacaaccctgagagctctgtgctctcagcaacttcagagaactcatcaatcctttctgggctcaaacttccctttgtccactcgaagacccagggtcacactctcatcctattacaaaaacaatgggctttgctatcgttgctgatgcctcatttctaggagttgagtattaagcactgaagagctttgaaagttgggcttctgagtcaattgatgtgctggagccaacttttctgactcacgagagacaaataggcacactcttcccagctccccattcagtgaagccatgttgacagcttgaaatccaccatagtgcctgtgttgatacaacagaaattggtaagtactactaggcatgtgcccacctccacagacactcagtgtaccagcacatcactggaatgttttctgagacagtgatgtccctgttatgtcgtcatgtcttgtggggccaaaaggactccgaattcacctcctctctgttcttgcttttagaaaccataatctaaaataacctcacctgacactatttctattcaatctccaaattccctcactttgtgggtctgtgtctcctgtaagcatgtcagtccacaacttgacaactattttgaatgtagctaaaggatacagtgaaccagtttattattttcaaattatccttccttgcatggaatatgtagatgctgcagtcattgggaacagagatggggcaagcagcagctctgggccgtgaaccactttagagtcagacaattcttcagtggcacagacacacccttgggcatggactaatttgctttggaaactaagcagttccacaccagtcaccaatgaccttggatctatttccagctgagaggtcaaaaagatcacactacctaaatgtcctcctctccaatatatagtacagcccccatccatctcagtccctggaggtcatccagagctcccagagaatctctgctctggggcagaatcaccacgtctcctcctcgccagctccccacaggctccagcaaggctttcctgccaggtgcagggcatgggtgtggctctgctgtctctcaggtagagggaggccatacgatgatgtttgtataagaaggattgggtttcagaggttcctctcaaatacttgacataattttatttgctttttgtttcactctacaatgtcaccatttaggagagcaattattttggttgcattatttatggaactttgaaagatttttgtggttaaattaatttaagaaatcattcccattgtgcatcttttctgttcagatataatctgaggcagtgaaagaaacagcaatgattctgaaagcagtcacttacatgccctctgataaaggcattgttcaaggttcattactcacacctaactttcagtctactggaaatgaaaggcacagagttgggggcctgtgatcaagccacaagagaggactataccagctactctgggacttcagggcacgaagagatgacctcccctttagactctgctcaacgacgaaggaatgagttggtccatgggaacctgaggagcagaaattccgggagcctttaactgggacggagcaaggactgtagagcaagtcattggaaagggaaatggttcatctggtctgtcacagaagatagtggatagaaaggtcatataatccccagttccctggctgatttgcttccttatgatactattttgcagcagcgtaccgtcatctcacaccactcctctacctcttccagaatcatctcctccctctctgctgctcagatcagcacatgtgcattgcacaagctattcttttactgtagcagaccttttgctggtcttaattatatccatccttattttcccattagatactgctccctccatgattgcttattgccttgcaagggatcctttaccccgcgcccccagacagagtctcactctgtcgcccaggctggagtgcagtggcgcaatctcggctcactacaagctctgccttccgggttcacgccattctcctgcctcagcctcccgagtagcgagtagctgggactacaggcgcccgccaccacgcccggatgattttctgtattttttagtatagagacggggtttcaccgtgttagccaggatggtctctatctcctgacctcgtgatccgcccgccttggcctcccaaagtgctgggattgcaggcagaagccactacgcctgaccaagggatcctattttttatatcccagttttactttttattaacacatatctgaccccatcttgaaggtaatcacattatctgcctagacttttgctaatctttatttttatggtaccattgtcatttggggggacatatttgtttatctttggtaatggaaatgaaattacgttacacttcactttctgtgttttcttcctactttagggtaaatattatttccttctattcttcctattctattcctctctctttagatagttttaagggagaaaatgtcagtgagactgtaactgcagctatggggtaagaattatttagaatgagggtgggatattaagcttgataactcaaaggaacagtcagggttaaaactaatgttgggatcggggttcagagaagttgcttgtaaaacctgcaggatggcacttctggaatagtctcccggctccctctgcagacacttcccagcatcccttgggccatttcccttgcaaaagcaatgatgaaatttcacttattggccacaagatggcactgtggtccactgggctctaagagactctggggagagcctgggagagcagcctaggaaggaaagggttaagaaaaatcagggctggcatccaatatcatgcagatgttgcagcagttttcagttattgctagactacctacagttatacaacatacaggaaatacctctaatctttaatgagatccacagttgaagaagtttggcctggcagccttggtgtcaagggcaggtgcagacagaggagcaactatctcagaggaaaatgggaaagtgaggggtgggctgtggcttaagcccagtgcgtctctgctgcaccccgtcttccctgcagctcttaccaggcaacagcctccatgagagtaggtggatcctgcctgagcccagtcagaatgccccggactaggtgaactctgtaggcatggggagtaacacaacaggcccacctttcacacgttttttttttttttttttttttttttttttttttttttttttttttttttgagacggagtctcgctctgtcgcccaggctggagtgcagtggcgcgatctcggctcactgcaagctccgcctcccgggttcacgccattctcctgcctcagcctcccgagtagctgggactacaggcgcccgccaccacgcccggctaattttttgtatttttagtagagacggggtttcaccgtgttagccaggatggtctcgatctcctgacctcgtgatccgcccgcctcggcctcccaaagtgctgggattacaggcgtgagccaccgcgcccggcctcacacgtttccaaagtctgggctccaagcctttttttcccctttcctctgcagagtcctgccacttctgaagccttgtcctcactttctgcctgcctctcccacagcccccatggaggcagggatcagccagataccaagatatcacagacacacagggaaaaagatcatcctgaaatatgctcagattaggaaccattattcagtgttctgttatcaataagaccaagaataggggctgaggctgatccattattcaggtagtattggcagcatgaccaaaggcggtgccaaggaagggtacaatgtctctggaaacaagctcaagcattttccctcaaccctggagtctactagcaccagccagacctctgtacctctgtggcagtgcatccgcagccctgcacagccaactgctctctgcacaaaaaagggcagccacaggctggaggtgggcactccttcccaaggcctctatctcaaccaggagataaagatgccttttttgaagctcttctcagatgtcccagcaatgggctcccagtctgtgcatcctcctgcagcaggaacttcagtgtgagctgaggtccatcactgtgatgtggatgcacgaatgcaaacaacacttaatgttattttactcaattcagaatattctggcagttgcgtaaaataggaatagtagctcccaaaatgaaatttgtgtctcattttctttatgagagaaaagaaaaaaaaacagaaagcagctgggcagctttaacctgcttgagtgatctgggattctacaagtctacaagtggtacaaagaacatcaccttggcctggattccaatggataccaaacactacaaaaagtattgaaaacaatttataaaagacctaagtaaacaatctacttataggaaatgttagtagatccatcgcatagtgccattatacctgacgatgatcaactagtgaaattattatgtagagattatcagctaagcctctacttattacctctgagcatagagcagtgtttgagccttctgagggtatcttaaggaaggaacttaattcttaccattactttggcttggattaaaatccatgagcttgtcgtttttattgtaaaatattacagaataataatgatcaaacgttttattttcctctagcgtttattcctctttagaacgtgcaggttgaagctcacacacatgagcagggttccttaagatgagatccattaactccaggactgggaggtacacagctggccttcacaggaagtgcaaaccccaaatgcagtgacccctcctgtgtctacgctgtgcccaatacccctctgtgaggctgccataaaggcgggcaggctccttgcttggcaaaaaaatcagttcaccaattggccactttgctgaagaccagaataaaaggctaaattgtgagaatgatgaatgcccaattcccaaattgtgaaatgtgtaacagttcacgattcttggaataatttcaaccatgtgtggtttgttttttttttaagtttttctttgtcgacagctttctttcggccactgatcctcagttgtttcccagccgccttgtcagctgatctcattttgatgctaatttttttttttttttgctagctttgggattatttgttcttgttttactatgtcctctaagtgtggtggtaggttgctaatgtgagatctctctaacttgtttatgtgggtgtttcgttctgtaaacaatactcctaacactgctatagctgtgtcccagagattctagtatatttaatcttggttttcattagtgccaaagaatgtcttgttttctaccttcattttatggcttacccaagtcattcactagcagattgtttaatttccatgtaattgtatgattttgagagatcttataactcttgatttctattttttttgtgctgtggtccaagagtatggttgacatgatttcagttttttttataatttgtttacaattagtctgtgtccaatcatgtggttgatttcagagtatgtgccatgtgtagatgagaagaatgtgtattatgctgttattgggtggagtgttctgtagatgtctgttaggaccacttagtcaaatgttgagtttagtttatgaatatctttgttagttttctgccttgacaatctaatactgagtgttgaactcttccagtattgttgtgtggttttctacgtgtctgtaggtctctaagaacttgttttatgaatccagctgaaccagtgttgggtacctatatatttaggatagtgaggtcttcttgttgaattgggccctttatcattatgcaatgcccttctttgtcatttctgataattgttggtttaaagtttgtattgcctgaaattagaatagcaacttctgctcttttttgtttcccattggcttggtcatttttctccatcgctttatgttgagcctatgggagttgcatatgagatgggtctcccgaagacagcatacagttcagtgtttcacttgtctatacaactggacgctctttttttttttttttttttttttttttgagatggagtctcgctctgtcgcccaggctggagtgcagtggcgcgatcttggctcactgcaagctccgcctcctgggttcacgccattctccggcttcagcctcccgagtagctgggactacaagtgcccgccaccacgcccagctaattttttgtattttagtagagacggggtttcaccgtgttagcccggatggtcttgatctcctgacctggtgatccgcccgccttggcctcccacagtgctgggattacaggcgtgagccacggcgcccggcagctcttttaataataaacgacttttatgtgctgtgtttagcctgtttacattcaaggttaatattaatacgtgtagatatgatcctgccattgtgttcttgcttggttgttatgcagacttgattgtgtagttgctttataatgtcaatggtctatgtacttgagtgtgttttttggtggctgttagtgatctttcatttctatgtttaggactcccttcaggacctcttgtaaggcaggtctggtagtaacaaattccttgaacatttgcttgtctgaagggatcttatttctcctttccttatgaagcttagtttggctggatatgaaatatatagggatactggttggaatttcatgtctttaagaatgttgaatattggctcccaattgtttctgccttgtaaagtttctcctgaaaaacctgctgttagtctgatgggattccctttgtaggtgacctgccttttctttctagctgactttaatattttttctttcatgttgaccttggagaatctgatgactatgtgtcttgggggtggttgtcttttatggtatctcataagaattctccgtgtttcctgaatttgaatattaaactctctagcaaggttagggaattttttgtgctcaatatcctccaatatgttttcaatgttgcttactctctctccctctctttcagggacatcaatgagtcataggtttggtctttttacataatcccatatttctcagaggtttacttcattcatttttcttttttttccattctttttttgtctgactgaattgattcaaaaataagtgttcaagctctgagattattttctcattgattatgctgttaatacttctgattacattatgacattgttgaggttagtttttcagctctatcagatcaattttgttctttcataaaatagctatttcatttttcagctaatgtgtcattttattggattcatcagattccttagattgactttcagctttcttccgaatcttgatagtgtttgtttctaacctgtttctgaattctatgtctatcatttcagccgcttcagcctggttaagaatcattgttgggaagctagtgtgttcatttggtgctaagaaggcactctgactttttaagttgccagagttctttcactggttctttctcatctctgtggtctgaggtttctttaatcttttaagctgatgtcttttggaagggttttttgcttttatattctatgcccttgagggtttcactgttacataagctgggttcaggagactggcttcatttatggaatatttcagggggctaagattcagctcagtatgtctgggctgcgtgttgtaggcctgtggtgctggaattaagcccagagctttggtttttgaccccttaaggttaaagcacctgctacaccagaggggctgaggcgttcccaattccactggcaacaacactgcaatggggaatgccagccaaagtactttttccaaatggtggcattggggtacatgctcagaagcatgtgccaataatggcaatgtggcagtttccatacatatgtttgtgctagcttttttattattatatagtaaacttctttgcctctttttatagttattgtcttgaaatatattttatctgatatagatatagctactcctgatcttttctggttttcacgtgcatgaaacatctttttgttatctcttcactttcaatctatatgtctttttaggggaggtgtgtttcttgtaagtgacagatcattgggtcttatttttatattcattcagctactctatgtcctttgattggtgagtttagatcatttacattcaatgttattgttgataactaagtactggctcctgccatgtatttgttttctggttgttttgtggtcttctcttcatttgtttcttctttcctgtcttctttttagtaaaggtgattttccctgataacgtgttttcatttcttgtttgttatttttgtgtatctgttgtatgtgtttgtatttaaagttactacgttgcatatgtttgtatttaaaattactatgcatgaggcttgcaaataatatcttatactgatgacaacataacactgattgcctaagcaaacaaaccaaaaaaaaacagagaaaactagtaaaaatcttatattttaacattgtccacctacctttcaactttgtgtcatttctatttatatcttaggcactgtctatgtcttgaaaagctgtagtttttttttttaattggttcatcttttagtctttataagtagtttacacgccgtaatcacagtattataatattgtgtttttcttcgcactattatcagttagttttgcacctgcagataatttcttatttctcattaatgttcttttctttcacgctgaaaaattatcttttgcatttcttctaggacaggtctggtgttgaggaagtccctcatattttgtttgtctggggaagtcattatttccctttcatgtttgaagggtattttcactgagtacactattctagtattaacgtttttttttttttagcattttaaatatgtcatgctgctctctcatgacctgtaagatttgcactgaaaaagtctgctgctagactatattggtggtccatggtatgttatctgtttcttttgctgcttttagaatcctttctttatccttgaaattttgatttatccttgaagtttgattattgtcttgatgtagtcttctttgacttaaatatgcttggtattctataatcttcttttacttgaatattgatatctttctctaagtttgggaatttctctattatcatagctttgaataaactttcagccctatctctctctctacctcctctttaaggtcaataactcttaaagttgcccttttgaggctatattctagatcttgtatttgtgcttcattaatttttatccttttgtctcctctggtggtgtattttcaaatagcctgtcttcaagctcactgattcttctgcctcatcaattgtgaggttgaaaccctgatgcattcgtcagaatgtcaattgtattttcagctccaaaatttctgcttgattgtttttaattatttagctctcttccggattctgaatttcttggctgtgttgtcttgaattttgttgagtttcttcaaaacagatattttgagttctgtgtctgaaatgtcacacatctctctctctctctctgggattggcctctggtgctttatttggttcatttggtgaggtcatgttttcctgaatggtcttgagacttgtggatgtttgcctgtgtctgggcattgaagacttaagtatttattgtagtctttgcagtctgggcttgtttgtactcgcccttggaaagcttttcaggtatttgaatgtacttgggtgttgtaatctaagttttctatctctgaaaccttatctgcattagggagcaccccaagtccagtaattctgtggtccttgtggactcacagatatactgccttggtggtcttggataagatctgaaagaattctctggattatcaggcagagactcttgttctcttccttcactttcactcaaacaaacatctctgtctctctctctgctgaactacctggaactgaggagtagtggtacaagctccctgtggctgccatcactgagaccctaggtcagaaaaagccagcatgataatgggtctcacccaaggtccacagtaaccactgccttgcttgttgcctatgttcaaggccccagggatctacaatcagcatgtggaaaagtcagccagtcttatacccttcccttcagggtcacgaggccccctgaccccaggcacatccagagatgttatccaggagccagggcctggagtcagaaaccttggggatctaactggtgctctattctgctgcaactgagctggcattcaagtcacaagataaagttatttccactcttccctgccctttcacaaccagaggagtctctccctatggctaccaccgccccaggcccacagcaagaattgcctgactattgccaatgttcactcaaggcccaaggactctttagccagcttgtggtaaatgctgccaggcctgagactcttctttcagggcaatgggctctcctctggcccaggactggtccagaaatgcaatccaacagcaaagtcctggaatccgggaccccaggagcctactttgtgctctactccactgtggccaaggtggtagctaatctgcaagacaaaggctcctttattattccctctccttttatcaagcagaaggagcctctcctcatattcatcacagctgggaatgtgctgcatcacacctgaaaccagcatgtctcagattctcacctaagctctatggcaagtactacctgggcattgctgctgattattcagggcccaagtgctctttattcagcagatgatgaatctttctgggccttgttccttccccacaaggcagcaggttcccttctggcccatggtgtgtttagaaatgtcatccaggagctagggcctagaattggggcctcagtactctgctcattgccctatctgactatggctgagctggtgtctgattttcaagaaaaagtcctctttactcttccctctcctgtctttaagtggagagaaggtatattaggccattctagcattgctataaagaatacctgagactgggtaatttataagaaaagaggtttaattggctcatggttctgcaggctgtacaagaggcataacactggcatctgtttctgggaaggctccaaaagcttataagtatgcagaaggccaagggagagcaggcgcatcacatcgcaaaatcaggagcaagagatagagagtggagggtgtattagtctgttcttatcctgctaataaagacatacccaagacggggtaatttatttaaaaaaaaaaaaaaagaggtttaatagactcacagttccacatgtctggggaagccacgcaatcatgacagaaggtgaaggaagaccaaaggcatgtcttacatggcagcaggcaagagagctttcacaagggaactcccatttataaaatcatcagaactcctgagacttatttactatcatgagaacagtatggagaaaaccaccctcatgactcaattatctccacctggccctcgccttgatacatgatgattattacaattcaaggtgaaattgggtggggacacagagccaaaccatatctgagggggagctgccacacacttttaaatgacaagatcttgcaaaaactcactcactatcgtgaagacagcactaagccatgagggatctgcccccatgacccaaataccacccaccaggccccacctccatcactggggatgacaattcaacatgagacatgggtggggacaaatattcaatctctgtcattctgccttttttctctctcaaatctcacatccttctcacattgcaaaatacaatcatgcctttccaacagtctcccaaagtcttaactctttccagcattaactcaaaagtccaaagtctaatgcctcatttaagacaaagcacatctcttccaccttactagcctgtaaaattaaaaatatatatatttactcttaagatacaacaagagtataggcatggggtaaacattcttcttccaaaagggagaaattgggcaaaagaaaggtgctacaggcgccatgcaactttgaagcccatcaggagagtcattaaatctttttgtttgtttgtttgtttgtttgtttgtttttgagacagagtcttgctctgtcacccagactggagtgcagtggtgcgatctcagctcactgaaacctctgcctcctgggttcaagtgattctcctgcctcagcctcctgaatagctgggattacaggcacgtgccatcatgcctggttaatttccatagttttagtagagatgggatttcgccatgttggccaggctgttctcgaactcctgacctcaggtgatcttcctgtcttggccgcccaaagtgctgaaatgataggcatgagccactgcacccagccaaagtcattaaatcttaaatctccaatagttcttgactccatgttccacattcagggcacacactggtgcaaagggggactaccaaggtcttgggagttcttcgtctgtggctttccagagttcagcccccagggttgctttcacatgttgttgggtgttttggcttgtccaggcacagggtgcaagctgtcagtgacaatatcgatctggggtctggagggcagttgtcccctttccaaaactccactaggcaatgccccagtgggattctgtatggggcctccaacctctaatttcctctctgcatttccctaatagagattctctgtaaggtttccacccttgcagcaggcttctgcctgatcaccaaagattttccataattctctgaaatctagatgaaggctgccaagctttcttgattcttgcattatgtacacctgtaggcttaacaccacatggaagccaccaaggctatagcttgcattctccaaagtggcaactcaagctgtatctgggcccctttgagccacagctggagctggagcagctgggatgcaggccgatgtgttctgaggctgggcagagcagcaggaccctgggcctggcacacaaaactattcactcctcctaggcttcagggctggtgatgggaggtactgcctggaagatttctgaattgtcttcaggcaattttcccaaagtctttgctattagcacttggctcttttttaactatgttaatatctctaacaagtggtagctccacagcctgcttgaattcttctcccacaacattttctttatttgccacatggttaggctgcaaattttccaaacttttacactctgcttcctgtttaaatatacattccagctttcagtgttttctttgctctcacatctgagtgtaggctgttagaagcagccaggccacatcttcaacactttgctgcttataaatttcttccaccagatacactaggtcatcactcgcaagttcaaacttccacagattcctagggcagaggcaaaatgcacccaagttctttgctaaggcataacatgtgtgacctttgccccagttcccaataagtttctcatttccatctaagacctcaacagcctggacttcactttccatatcactatcagcattttggtcacaaccatttaaccagtctctcagaaattccaaactttccatcatattcctgtcttcttctgagccctctaaactcttccaacttttgcccattacccagttccaaagctgcttacacattttcagttatttttataacaatacccaacttcttgtatcaattttctgaattaggccattcttgcattgctgtaaagaaatacctgagactaggtcatttacaagaaaaatggtttaataggctcatggtttttcaggccgtacagaaggcataacaccagcatctgcttctggtgtagtctcaaaagcttacaatcatggaagaaagaaaaggggaggcaggcacattacatggtgaaaacaggaacaagagagagaaagagagtgtgtgggggagggagggaaggtcatttaaaacatacttttaaatgaccagatctcacaataattcattctctattctgaggacagcatcaagccataagggatctgcccccgtgatacaaacacccctcaccagcatggggattacaattcaacatgagatttgggtggggacaaatatccaaactatatccgaaggagtctcacctggagctgtgggctgtgctgcctgaggttggggatggggtggcataagcaatttcttggccaccccagctggtatctcactaggtcatgtgtccccaagtccactgactctgagttcagcacagcaccaagacttgcccaggaattgtagtccttgtggcctggactgtgtttcaagtttatttaggaccctaaggcactttagcccatggtagcgaggctagccagaactcaggttctgactgctgggataagtgattcccctctgactagggctggtctaaatgttcttccatgagtgctggctgagtcctgcctgctgttgctatccactgtgtgaggacagcaacgacttccaacacaaagtcccacagtcactgcactctccctaacccaaatgcacagactgtctctccaagccatatggccactgccaggggatgggggaggcatggtattggcaattcaagagtgtcttttctacctctttagtgcctctttcagtgatatgaagttaaaaccaggtactgtggtcacttagttgatttttggttcttatgaaggtgctattttgtgtggatagttgttcagtttgatgttcttgtttggaggaacagttaacgaaggcttctatttggccatcatgttctaccttcttcttaatcattctattgggtctgtagtgatatctctatgcatttttctataagtaattatatttacatttttttctgttttcattagtaatttctatctccttttttcaagtgtctgcttttaaatttgcctgttttaaaatcttacgttgtttgttcttatattactaatacgtataatatgtttgtattttttatataaaccttttgaccattaaatatattgagttagtcttctcccagagtggcctgcctttgtactttctgaatagtgtcttctcatgaactgaaattttctattttttgaagtttaattcatatatatttttccttttacagtgactactctttgcatttcaaggatatcttgcctataacagaattatgagttgttccattctgttacttactctactcctcctcattagtagccccatccctttttctttgtcatcacttgaaaatgctaaatctccaaaatcacaaattaaatattccactatctgcctacagcttcttatcctatcatacctgttctttgatattattgacatctcctctccactggtaaatattctttctatttcctagggtccctacagaatttctttactcattctagagcagatatgaggatgctacgtgttaaaaatcctagcttgcaaatagttattattttatattgatactcttaggcttccctttcatttacaaaaataaacaagaataaatgcactgatctctttggcatggcagaagctgaatgctgtcagagtaagtcacaccggcacaaactgttatcatgataaatacatagtcactaagcttacctgcctttatatccctgctttgagattatagtatggtccttttactagctcagtctttcaccctcctcaaatattgtttcaaatatttaagacttttttccagtccctaattcttctcttcttgcctcttaagccaaaggcacatcttgttaggacatgctggaccttgcatctctgcaattaacacagtttttctactgtgtgaaggtgtcaccttgagtgaagatggttcttgcggacgggaacccagtgtggggctcaactctaaagggatgtggcaatgggtctgaaaatgggttctcaatgaagcatcacagtgtccactatgtttatgaagtagatccaccctgccacagacttctaggtaagagtaggtgatcatgcatcatgattctctactagaacctctttagattccatgtactcaagtcatactatttattttcatactgcatattttaatgcttctcccaactcttttggtaatgctaattgcatgtgatagaattttcgttactgctatttgcaaagagtgagaaattgtattatttctaattgcagaatgttagaacttgtattattttgttaaagcaaaataagatctccaagactcacttttccattgctatgtctattaaccatggtcctggaggtattgaggagggatgaaaagacaatttacaaaactgtggcaaggttaaggaacccagtaagagaagagaaaggattatggggatagtatagtgagtgctcttattcacattggcctaaaagaagtaggagagtgtgtggatctcggggcttttgacattttacatttggggtaaggatgtttgtagggtgctgtgacctttggtagagaaaagcaatcaatatgaaatagtccagcaaggaggcagccaggagacacacaaaccgggacagttggttaccctctctctctctctctcctgccattgtctctcataagacaaactcactctggagtacacaaaaagagatgcagttactataatccattggcatcaacctctgaaggcaggatggatctggagggataaacataacctgcccagaggatgactcatagggtggccttgtgggtgctgaatcccaagtggttaggtctgtgctgtgagctgataaagccccagaattatttatggggaatctatactcctaataatttacagacaacacagatccactttggacttgatcagatggacaaaatcttggggacttgacatcactgcgcacacaggggaggagctgggattgttgtccaggaaaggaaaatataaggagaaaccttggtttgaatttggtgtcagacatatgatgagaggacagccaggaagatctggaacatgaagatttaattacaggccactaactctcagctgacgggcaggtctgtgagttccagaatggagcactgcagcagtaggtggggaggaggctgagagggcgatgaggcagtctgagtgctgagggcagtgcagtcagagaagcaactgcctcatcacagaagcttctgcccttactcagcccccttgctctgcaggatgaggagggagttccatgggtagggaccactggacctaaggaagcctgaaggggaaggaccacaggacagtgacatcacaggatatccttcctatcaggaaaagtgaggctcagaactcagctcttcctgggaggaccaagccctgagcacaggtgcagtgctgcctgctccgctgtgccatgggctccggactcctctgctggacgctgctttgtttcctgggagcaggtgaatcctgtggacaggacagcacccctattctcagcttgcccacccctgtgtcccccacttcaccatggggaggcacaagttcattctccacctattttttcctcaggcccagtggaggctggaatcacccaagctccaagacacctgatcaaaacaagagaccagcaagtgacactgagatgctcccctgcctctgggcataactgtgtgtcctggtacctacgaactccaagtcagcccctctagttattgttacaatattgtaataggttacaaagagcaaaaggaaacttgcctaattgattctcagctcaccacgtccataactattactgagtcaaacacggagctaggggactcagccctgtatctctgtgccagcaacttgatgcaggcctgcagagccaagaacattctgtgtacaaacatccctgccccagtgtggagaacttcagccctaacatatctgtgagaacttgaggactgtagtgggaaagaaaagcagtttcaggaagctggatcctaaaacctggggttttctgccagttaggagtggggataacaaagccaagagggtctgctcaggaggtggtgaaaactaccttcttcgccaaacgctgtacactatagggatagtggaagtgtttgtaatttaatagctggtgccctctttacagggcagcagatttaatttcagggtcaagattcttgataatagtgtggaagggaaaatcatagggtttgctttatataattcagggagaagaaagtgagatttggggaaattctatgaaagagaaaatgatcaaagatagttgaaaacagagatagagcagaaggtaatgaaacatggtgatctgtgcaccatgagctcccttctcctcccacagtttttgatatccagaaaatacaaagaaaggtcttatagcaactgacatcacctggggactggtcctagttggggatatcacaaatagcagcctgcctgatgtgagggccttggggttggttctgacatcttctttctcgacttctggatctagtcttgcctgctcgaggcacagtcaaatacttcccaaaacacaaaggaggtcaggtcagtcttggtcctaaaggtgcaaatgctgtccgttttctcccaagataaaattctgcatccctgggattcctctctgagactcagtgcccagattcaattaccttctgtaattaaacagttctttgaacattttctaaaactcatcagccttggtatcatctgcatttctgctatttccttggcctggaaacttttgttctctccagacacatccagcccctgctcatctgtcaaggatggtctcacatctgccttactctttgcttcttaccctgacattccctggaactggactgtatcaatttatttatttacttttttaagacaagagtctcactctgttgcctgggctggagtgcagtggcatgatcttggctcactgcaacctccatccccccggttcaagctattctcatgcctcagccttgagagtagctggaattacaggcacatgccatcatgcatggctaatttgttttgtattattagtagagacacggtttcaccatgatggccaagctagtctcaagctcctgacctcaagtgatccccacgcctcagcctcccaagtgctgggattacaggcatgagtcactgcgcccagccctggactgtatcactttcttttctttattttcataagaaaagccaagtttataattaatagtatctgaagtttgtaaaatgaaaaagttaatgcatacttatatagaatcctggaatatcattaatcaccatcttcccttcaatgggactcctctttcttaaaatgtaatgaagattcttagagacagtgtcagtttttcatataatttctgcaatattctaagcaattgtgtcttcatagtcagaattgataaccaatgctataaagtatcctaactctaaggctggaatttgcaaatactcttttggagcaaataaaattgtgttgtagtaatattcatccagtctcatgatcctgaaaaaacaaattattcagcataaccacactttccacagccacatttttagagatttgatgagactggaacatcatcaaagatgcttctcagaaatcaacctaaaaaactgaaataaaaattagttaagctcagtaatggaatcttatcatcctttctgagtaaaagatattgtgtgtgcaggaacagaaaaccaaacaccacatgttctcattcataagtgggagttgaacaatgagaacacatggacatagggaggggaacatcacacaccggggcctgtcggggggttgggggaaggggagggagagcattaggacaaatccctaatgcacgcggggcttaaagcctagatgacaggttgatgggtacagcaaaccaccgaggcacatgtatacttatgtaacaaacctgcacgttctgcacatgtatcccagaacttaaagtaaaataaaaaaaaaaaaacccaagatattgtgtgtgtgtgtgtgtgtgtgtgtgtgtgtttgtgtgtgtgtttgtgtgtgttttctgtggagactcagccgcatggaaatagtttctcagggtggcattactaagaggtgttgggtcattggcagagctcctaggtacttctgggtaaagaaaggaaatatcagacccaattgaatctgcctaagttatatacagctcatagggtcgtttatttcaagattttttaaaattcagaaataaatttgtaaaattgaaaaatcctctttatagaatgtgctatctaaaatctgggaataataaatctaaatataggccagacgcggtggtttacacctgtaatcccagcactttgggaggccgaggcgggtggatcacgagatcgagagatcgagaccatcctggccaacatggtgaaactccgtctctactaaaaatacaaaaattagctgggcatggtgacaggcacctgtagtcccagctgctcaggaggctgaggcaggagaatggcttgaacccaggaggtggaggttgcagtgagctgagattgcgccactgcactccagcctgggtgacagagcaaaacagcgtctcaaaaaaaaaaaaaaaaaaaaaaaaaaaagtctaaatacaaagtgtgaaaaggtgtggctctgattattcaaagggagctctggaatgtcgtgtttccagtctggatctgcttgatatcctcacactgtttcaccctgtggcctgtataattctggctcctctcttccatcttaggatactcattgcaatgatgtagcagcagtttattgtgcaatcaagatgtgcccttttgttttcactggccaagggtgaatttgaagttccaccctaagtcaacccttctgggaaagcaatagagagtgtgtgtgtgagagggtgtgggttgcaggggttggtgtaggggcatctctgctcctgacttagacaatgctgagctcatcaggtcagaaggtgtgaatccatgagactggaactttggccacttggaggtgctgtggctccacaaagctgtggggaaccctggggaggggtggagggtgacccaggagaggacggctgaagggaatgcttggctgcgtgctggcatcaggaggcggttggaattcagagtaggtcctgggactgcccagggcaaggtaggcacaccagggacctcagtttgcatcaaggagagaatgtctttgcctctgcatgggcagtggagggtgaagaggctggggcagcaagggctgggagtcagtgccaggaaagtgacaggggttgtcagagaaaaataaggtgggatatgggcatgtggagactgtgttccacctgccccacttttaatttcagggttgtgtaggacaggaatggtgcaggaagcagcagagcctggggtctgacaatgggtagagcaggcaggggtggcctgcagggagagttactgggaaaggccggtttcccaaggaaatgcctgaaacattcctgccccactcaggaaatgaccatgaggtgggtgctgccagacagaggggttcaggccctgcagagctgacaggcctttcccaggcactccctgctgcttctacatgtgatctgctttaatgcccactgatatcaggcagggtaaatatgattttacctgtttatacatatgggggaagcagctgtccctgttctcatgtttagtaactggctatagtcagttcctccaacacctctgcacgccgccctgctctgtacatgtgtcctctcctctggcttcctcatttcagatccccgttagcaggagggaaagatcatgtctcatatgtggtcattaaaacctcttccccgacaagcccaaggaacttccaggtcaagcatctacattcatccttcactgtaggaaagaaaaagaaataaaattttctgcactgtggactttctgtaactgatgtaatataccttgaggaaaatgagcataaatagttgctattcattaattaattaatcttattcttttactcaataaactttttgaggatccttctttgtataaggtattctgtgacataaaattgaaaagaaaaaatattaagtggaaaaaatgtttcttgctttttacagtgttaaggtttgcatttattttttaaattgttttctttattaaaaatagtttactgatttctaaattatacaaatttacttttttctctttttttggctaactagtcccattttagacagccatttaatttaactgtggtaggaatatgtaatatgaaatatatctttttaacagatttttgtatgtacaatacggtattgtaatctacgggcaaaaggttgtacggcaatctctagatcttattcatcctccttaactgaaattgtataccattgacagcaactctccatttactccaatccccagcccttggaaattaccttcacctttgcttccgatacttcgattatttacgttccatcatataagcagaatcatgtggtatttgcctttctgtgcctggcttattcacttagtgtaatgtcctgtgggtttatccacattgtcatatatggctggattttcctctttttaaatgtttaaaatacttctttgtatgcatctaacatgtttaagttctgaagtataaaatgtgtcatatctgactgtttctatgaaacagtctgtcacatgactggcagtcatttgcagaactgcaagcactgagtacactgatgcacattcacagttcaattctgcttcatggagaagacttagagaaaatattaatctaatcattcattatcattttatgatgcacaaaatagaaagccttcattaggaaaatttcaattaattagaaattcaactatacgaaaacatcttaacgtgtaaacgctattctcattttacaggtagaggaattggcccatagtttaaattacttgaccaaattaagtaggaattaggatgcagtactggggttctaaccctggtctatcaaagccctgttttttatagctatatactataatctatttcataacaaatgatgcttatcttcacaaaaattcaaatgttatctcctaggtccctttcagacctgctggctctaataacatcatagacagaaatcagtttaccctggagaggggggggtgggaaacaactatgaatgggtgccatgacatcaagcctgactcccattctagcaccagctcctcaagacgtgaggccagttcttgacagatttggcttagtttgttttctgtttttttgtttttgtttttgttgttgtttttgtttgtttgttttaatctatgaaatgagactgctactgtccatccgcaggctgtgtacaaaattaaatagcataaagtatctagcatgtagcagaaatctagatattaggttggtgcaaaactaattgaggtttttgccgttacttttagttacttttaatggtaagaactgcaatacttttgtaccaacataatattttaatttcctttgataatctcagatagcctctttcaccatgccaatgtgcaaaggcagatgcggacatatgatacctagaaatcttaggttgaggattcagaagtcacagaaatggaaatgtacatttcctctgatgatttatttgatgaaattaactaattaactaaagaatgcagtatggatccctcttgaggtatttaaaaaatcaatgttgttgacatataaattatacaatgtaaacattatacatcttaaatgaacagatcagtgatttttgagcaatatatatgtatatgcccttataatccccacccctcttaaaatgtaaaatatccccacccctattaaaatgtagactatctccagaaagttccctcgaacacctctgcaatgcctatcttggtcccagaaaaccaatgatgtaacttctatcactggagagtagttttgttcacaaatatttttaatgtcaatttaaaacccatactgattaatcctcttgaatacatagctaaataatcaaggcaaggaagagtttctgggaggttttatggttttagaagggattgaaaccatgagagctaccttgatccatggtaggaacgattctatctggagatggatgttgtgccgaaataacctcaaaaggtcttttcagctggtagaagctgattcgacaacatttatttattcattttcattcatttctttgcttctccattcattaactcaaattgtttagtaatgatatcctgataacagttaattatctccaaggaaattattttgagttcccataggacacacatgcagctggttttgtgttcacacactgagaacgctggcgtcaagcaaaccatggtaacagagacttcattgaaagatgatgttacattgggagaagcattctttttgccttaaccccaagtgtttaactcataaatcctgagccttcagctagaattcatcttcctgttctggccctgtcctgggcaccaggatcctgagctgtgtgttcctgtctcttgaaccacaggagtcctgggcacgcacatgaaacccactaatgggcttgttggatcccagctgtgactttcagcaccaggtggcccttagctgtgactttaatttctgtgtccttcactgctaagtgaagccccatagacgctgaatgaccagatcttggtgatgcattgtgctgaaaggaaaccagcacagggggaggtgagcagaatatgaaacaaaatcatgtatttacaaccagcgacatgacttactggcagatcctttgttcaaacactattaagaatttaaaaatcatgacagcagagtgataaagcaagcgtgggatccttctgaatgcagggctctgtacaccgaagatacagtttttgagctccttttcatttattactaaattaatggcaggaatcctgaacgaagggatattccctatgagacatgacacctcaaataaaacgagagcatttttccttatcttgaagtctgctccctctcgccaagtccctcactcatcaggacacctttgtgctcacaagtcttcagcagcgctgggtggccaccattgtccacacagagagggcagtcagcagcatgaggtggttctgcctgctgtggtctcaccccaggaacagaaagcaagactcctggatggagctgaaggtgctcagctggacttgtcaggagtcccatctgtcagtgaattgacaagaaacagagcaaaactactcctgcaatgttgatgagcctgcccctgggatttggaaacctgataacagagaaaaccaatatagacacaggactttaacaggattatggtcaattaagcagattggaaaaggatacttgaaggagtgtttgggacacaggaatcaaaaacaccagggagacaagaggatttttcctaagattctagactacagcaatacatagataactaacaccagaatattaatgaggaattatatcattgcaggaataaaatttatattgaattacaaactgtttgcacaaaagtcaagaaaaacttgaaagccttatatcaagaagcattcttcccatccaaacttcagtggtgcatttattttggatttgaccctctggggaaggggcatggcctctctcgacaagaaggttctggggaccaggcagagagaatgaggtctcaggatgacttccttgacagccctgttcgcctttcatcaacacacagacccagaagacctctctgtcttgtagcatctgccatgagaatcaggctcctgtgctgtgtggccttttctctcctgtgggcaggtaagtcctgggcagggcccatgtgtagatttcaagacccagagccttcccattgaggctgcagcattggctttgttctccttctctgtaggtccagtgattgctgggatcacccaggcaccaacatctcagatcctggcagcaggacggcgcatgacactgagatgtacccaggatatgagacataatgccatgtactggtatagacaagatctaggactggggctaaggctcatccattattcaaatactgcaggtaccactggcaaaggagaagtccctgatggttatagtgtctccagagcaaacacagatgatttccccctcacgttggcgtctgctgtaccctctcagacatctgtgtacttctgtgccagcagtgactccacagtgctgcacagccatctcctctctgtacataaatgcaggggaggctctgccctcctccccgaccccagactcaaccatgtccttggcagagttctcagcactgggaatcttggaagcccaatgggtgccgggcagtgtgagcctcagtctgtgccaggtgcctctgcaggcagtcccagccaggcctggactggtcccagagcctcagaggtctcttttgttgctctctggtctttcttccaagctatctttttgggatgggaccagggctttcccagctcttacttttctactcatcatcctgagtctgaggtccacaggatggaacaggatttgtatttcaaatctgtctagactcctgtttctctctgggggccacgttgcttcctctctccagggtttcctccagtacccactctcatgtggtctcacctgtggcccgcctttcccatctgagcagtcacccccgaaggccttgctgggcctctgcacaccacctcccctcgcctttctactgcagccatgaggctgcctcttctgtgcctccttcctttccaacacagagacctcaaaggccatttcctccgccctgggctagtgccttcctttctgcagtggtcagcttctacctgcacttctgatctcagcatgatcagcctctcctgctggaagcactccctcaactctcagctgaggtcaaatttcagtttccctctcataagctcacagaatcatgtgcctcttagtaaagttcagcaccgttgcaatttttccaacacttgttttattccttttgtgctccacttaattttaaactcatgaagctgaaggctgagcttgttacattcaccaccagcagtgcctggcaggcagggagtcctcattcatttcacagagaatggatgagtgagtgacaggtgagtgagtgatgagtgggtgaatgaaccagtaacaggaacacactagattcattgtaccctggcagaggtctagagttaactttgcctgagatgctctgttatgagctcatcaaggagcactcacttgttgaacaagcataggaccatgcatggtgcaagccagtttgtcagtctgggaatttccaatttaaaatatgatgtgttcttcaagctgaatgagggtaaactttctgtatataattataatatctaagccatttcttaaagttttgggttaggaacaaaaaacccctgaagagggaacatttgtagatttaggatttttaaaatatatttatattattttcccttggaagaacaggatgggaacagccttatagttgctaatttgtggagaaggcatcatataaaagtaagagaaaatcagaattgtgttctagagggtaaattgtggctgtcctgagagcatgttccccaggaacctaaaccgtgagcatgttcaggaacccagagtgcaacagacaattcttggccccatgaatttggtggtaagactggagacagttggaaaaaccatggagtcttgaagttcttcactctcaatgcaggcctctcttgaacaccacagactaatgtcagataaatatgcttccactattaagactattaaaacaagaaccaatgaagagaagtgagcagaaacaataagcaattgaagtgtttgaagacaagaaatttttaccattaaaaggtatgaaagtttgtagaactatgtttaaaggaaattgaaatgtgaacaagaaaaaaagactgacagaaaccatcaagataacattaaaaaataatcaaattcaatacagaaatgattaagattatcactgaaaacaaaatggaaatgaagaaagatgaaatgcttctaagagattattagtgatgtcaaggacagagctgaagaagttacatagaatgcagcaccgaaaattaaatatgtaactttagaaagagcttaagggtggtttccagcatagtagaatatataatttttaattatatatatttatttatataaagttatttatatttatatatttaattatatatttattatataaaaatatataatataataatatagaatatagaatatatattctataatatagaatatagaatatatattatataatatagaatatagaatatatattatataatatagaatatagaatatattatatagaatatataaatatatatatttcccatttttcttatagataattgaagtttcagaaaaagaaagtagagggaataagtgattgtgatgagacattagctgagaattttccagaggtgtttcaggacctaaattctcaatttcaagaattcaaatgaatatgaaataagataaatgtttatattataatgagattgtggaacataagtgacaaatagatgattctaaaagctgtcaaaaagaaaagataaatctctcctagtggaatagactgaaaaaatcaatgaaagaaagaggatcagaaataaccatttagtcggaattataatccccattcattaaacactgagatggaggaaaatatatttacaagtggaaaaattaaaaaaaaagactatgagttttccaataaggtatcttttctgaattatagtcaacaaaggtgggaagtggtcccagaagaaaggcatgaggtgcagcttgtgagggaacccatgtgttgggacagccccgttgggcacgtgtgactgggggatggaggaggctggggcatcaatggggatggcataggggaccctgacttgcagaaaagacaatgagctcatcccttggtgccttgtgttgggggcgctgttggcacatcctagagaacatgcccagcagacagaggagcgcctgtgtggtgaggagataaactcagaaatgcagcatgaggcctgtagctccagacagctctagagcacaaagtgaagaccgatgcattgatgttgtttaaaaggagctaataaatatctaaagcagtcatccaagtgtgttctaatataaatcctgtgttcctgaggttgtggggattgagagaggaagtgatgtcactgtgggtactgttctgtgtcaggacaaggacgtccctcctcctctgctcctgctcacagtgaccctgatctggtaaagctcccatcctgccctgactctgtcatgggcaccaggctcctctgctgggcagccctgtgcctcctgggggcaggtgagtcctcagacaccaaccagtctcattctgtgtgtctgtatgtgtgtgtgtgtgtgtgatgagtacaactgttttcctcatcctgttctcaacttgtgtctccgcagatcacacaggtgctggagtctcccagacccccagtaacaaggtcacagagaagggaaaatatgtagagctcaggtgtgatccaatttcaggtcatactgccctttactggtaccgacaaagcctggggcagggcccagagtttctaatttacttccaaggcacgggtgcggcagatgactcagggctgcccaacgatcggttctttgcagtcaggcctgagggatccgtctctactctgaagatccagcgcacagagcggggggactcagccgtgtatctctgtgccagcagcttaaccacagcatgacacaatcgcctccttcctgctcataaacctcctcctctctctccttgcttccttatgatactattttgcaccaggggatcctcatctcacaccactccactgcctcttccagaatcattgcttgcatgtccgctgctcagatcagcagatgtgcgttgtatatgttaatcattttctgtggaaggctcgttgctggtcttcattatccatccttattttccacattggatactgctcccttcaagattacttgttgcctacaagggatcctactttttacattcaaattttactttttattaatacgtatttgatgccatcttgaaggcaatctcattatcatcctaatcttttgctaatctttatgtttacggtaacattgattgttattttgggggacatgtatttcatctttggtaatgaaatgaaataactatgcacttcaattcctgtatgttctgcctacttaagagtaaatccaattttcttccattcctcccattctatcccactccctttatatgatagttttaagggagaaaatattaattagactctaactgcagctatgtgataagagttatttagaatgagggtgggatattaagctttgagtaaagcaatagtcagggttagaactagtgttggaatcagggtttagggaagttgctcataaaacctgcaggatgacacttctagaatagtctctcactcactctgcagacacttcccagcatcccttgggccattgcaaaagcaatgatgaaacttcacgtgttggccacaagatggcactgtggtccactgggatctaagggactctggggagagcctgggagagcagcctaggaagggaagggttaagaaaaattagggctggcatccaatattatgcagatgttgcagcagttttcagtcattgctaggctacctacagctatgcaagatgcaggaaatacctctaatctttaatgagatccacagttgaagaattttggcctggcagccttggtgtcaagcgcaggtgcaagcagaggagcaactgcctcaaaggaacgtgggaaagctaggggcgggctgtgccctaagctcagtatgtctctgctgcaccccatcttccctgcagacctcgccgggcaacagccttcatgagaggaggtggatcctgcctgagaccagtcagaaggccctggaccagctggactccgtaggcatggggggtgacaccacaggcccaccagactattccctagggagcagcctccaagccccagctcacagtcctgaggatcactgcacttagttgggccagcccctcctcactctgaccctaccatgaaccccaaactcttctgtgtgaccctttgtctcctgggagcagataagttctggaaacagctgcaaaaccctgtaatgggtttgcaatgtctgggctacaagccttttttgtcctttcctctgcagagtccccttatttcttaagtcttgtcttcactttctgtctgcctctccagcaggctctattgatgctgggatcacccagatgccaagatatcacattgtacagaagaaagagatgatcctggaatgtgctcaggttaggaacagtgttctgatatcgacaggacccaagacgggggctgaagcttatccactattcaggcagtggtcacagcaggaccaaagttgatgtcacagaggggtactgtgtttcttgaaacaagcttgagcatttccccaatcctggcatccaccagcaccagccagacctatctgtaccactgtggcagcacatccgcagccctgcacagccagctgccctctgcacaaaaagggcagtcacaggctggaggtgggcactccttatggaagcccgtgtctcaaccagaagaaaaagctgccctttctgaagctcttcccagacttcccagcaatgagatctcattctatgtgtgctcctgcagcataaaacttagagtgagctgggtctgtcactgtagtgcggatgtgtaaatgcaaacaacgtaatgttattttgctcaatttggaatattctggtaattgtgcaaaggaatggtagcttctaacaagaaattcatatttcactttcttttcaggagagaagaaaaaagcagaaagcagctgggaagctttagcctgcttgagtgatctgggattctcaagtagcatacataacatcaccttggctttggttcctttagataccaagcatgtgttctgtggaggacaagaaaatccatttttttttgttataaagttataaacacacaagagaacaatccagttagggagaatgttaataaatacaacaaactctgccattagacctgaagataatcagctagtagaattatcaaagagattgtaagactcttactgagtacctgtttgaggtcctctgaggatagatgaaggaaggaacttaattcttaccatcactgtggcttggattagaatccatgagttccttaacttgtttttcttgtaaaatattataaaataatatagaacacacattttattttcctgtagcctgtagtcctctttagcacctaaagggagaagcgcatatcccggtgcaaaagggagctggttgcttgcttggcaaaaaaatgaattcaccaattggccaatctgctgaaagtcaaaatgaaaggctaatatatgagactgatgacagttcatggttcttggtataacttcaacagcgagtgaacatttttttctttgtctatagctttctttcagccatcgatcctcagttgtgtcttagcctcttatcagtccagctcactttgatactaaatttgattgttgtgtatctcagcaagaagcacgtctcacattctctgtattttatgtggtcatgagtgtgttcctgtcttattcttattttatgtggtgcatttttaaataggactgtacagaatacaagcatctatttgtatatgactctcatcttttatggggagaggtcagagtaggtgagcgtgcactttgattctctgctggaatctctttggattctatgtcccctgtcacatggtttattttcatatgcatatttctcatggttctcctgactcttttagcaatgctcattgcaggatattagaaattgtattacttctaatggcagaatgttagaaattgtgttgactcttaaggcaaaataaaatacccggactcacctttccattgctgtgtctattagtcgtggtcctggagatatcaaggagggacaaaaggagtatttgcaaaggtgtggcagggttaagggaacccagtaagagaagtagaagtagcctaagaacagcagaatctgtggctcttattcacattggcctgaaataagtaggagaggatgtggatcccaaagcatcaggtactgtagctctaaggcaaggctgcctataaggtgctgtggactttggtagggaaaagtaacctatataaaataatgaagcaagaggagagccagggcatagatgaatcagaacaagtggtgcccctacctccctctactctcctgccattgtctcccattagccaaactcactctggagttagagaagaagagagccagttaacataatacactgaggtcagcctctgaaggcagggtggatctggagaaattaacgtaaattatccagatcactacgcataagatggccttgagggtgctgaatcccaaactgtctggctaggtctgtgctgtgagctgataaagccctagtgttatttctggggaatctgtactcttaataatttacagacaaccaaggtctgctttggatctgatcagatagactaaatcttggggactttgcaccactggccactcaagggaggggctggaaatattttctgaggacaaaaaaatagaattagaaaatttggttgaatctagcgtcagagagatgacattaggacagccagggagagctggaacaagaaggtttaatcacaggctcctcaccctctgctgatgggcaggtgtgtgagctccagcatggagcacgacagcactaggtgggaggagggtgagagggtgatggggcagcctgggagctggagcagtgtaggcagaggagcaactgtctcatcacagaagcttctgccctcacccaacccttctgctggacagggagggagttcaggttgtggggagtactggacctcaggaagcatttatagggaggacacaggacagtgacatcacaggatatcccacccatcaggaaaatcaaggcccagaactcacttggcccttccccaggaggaccaagccctgaatcagatgcagtgctgcctgccccactgtgccatgggccccgggctcctctgctgggaactgctttatctcctgggagcagatgagtcctgtgcacagaacagcagccccattctcagatttcccacccctgtgtcctccactttacactggggaggacctccaggctgtctgctgtgctcatcctccatctgcttttcccacaggcccagtggaggctggagtcacccaaagtcccacacacctgatcaaaacgagaggacagcaagtgactctgagatgctctcctatctctgggcacagcagtgtgtcctggtaccaacaggccccgggtcaggggccccagtttatctttgaatatgctaatgagttaaggagatcagaaggaaacttccctaatcgattctcagggcgccagttccatgactgttgctctgagatgaatgtgagtgccttggagctgggggactcggccctgtatctctgtgccagaagcttggcacagccctgcagagtcactggaactctgtgcactaatctctctgcttccgtgtacagcagtctcagaccagacagctgtgagaacctggggccttcagggggaaagataaacaatttcaggactctgaacaaggctggcggaaacaaggccaggaggatatgctcagaggatggtgctgcttcaggaggttcacggcaaaattactttctttgtcggatgctgtacactatagtgatagagtagctggcactctcctttttagaaaaagaaattcattttggtgtcaggattgttcgacagatgtgtagtatagaaggtaaaatctcaagggtttgctttatataattaagggagaagaaattgagatttggtttggagaaacttgaggagagagaacatgattaaagattattaaataaatagaagtagagctaccagatgataaaaaattgtgttctctgcaacataacctgtcaaagttttcaattgctagaaaatacgcagcaaggccttgtagcaactggcatcaccccgaggccactctatgatggtcatcaccacgtagccagttgccctgtgggagggccctggagctggttccaatgtcttccttctggacttatatctcaattctcaaaacagaggaattcatttcactgctgatggtaaacagataaaggctctcccatttccccaaagatacattctgcttcccttgtatctctttctgacacttaccgcccagatccattaccttctgtgatcaaacacctcttcgaatatttcctaaaactctgcagcctttacattctctgcatttgtgctcagtatttccatggcctggaaggaccttctgtctcccaagaaacagccagaccctgcttatcggtcaaggatgggctcacacctgcttcctctttgcttcttaccatgacattccccagcattgtactataccaccatctttattattttcataggaaaagccaagtattaattaaatatataatgaatattatttgatgttgtgaaatctatgttaattcctgcttatatagagttctggaatattattacttttattcatgtgagggatattattaaccactaactatttcctggttagagatcaaagtcacttctgtgtaatgatagcaaatgtgagaaccagctgaatctgtttgaattacagctggcagtattattcatttcaaaatttttataatttagaagtaaatttttaaaatctagaaatccttttgtgaaatgcactgtctaaaatttagtaataatgaacctaaatacaaaatatgaaaacatatgggtgtaattaactgggattagctgtggaatatagggtttccaggctgggtttccttgatagcatcacactgtttaattgtatggcctttataattctggctggtctctaccatcttaacatattatttgcaattatgtaacaattgtttattttgtaatcaaaatgttggttcatgtgtcctttgactccattggctaagggtagatttgaaaatcaaccctaaattgactcttctgggaaagcatggacggggtgtgtaagagggtgggagtggcaggagtgggggcatctctctttctgatttggacaatttgagcatatcacgtcagagggtatgaatccatgagactgtagactgttggccacttggaggcgctgtggctccacagtgctgcagagaactcagcggaggggtgggagagtggccaagagaggaggactgaaggggatgccctggctgcctgctggcatcagtagagtggatggaattccctgagtggggcctggccatgtagagttaagcacagactatcattgccttgaaagagttggggtgccagaggcctcagtttgcatcaaggagggagtgtctctgctgctgcacgggcagtggagggtgaaggggctggggtggcaagggctggggaatcagtgtcagggcagggacagggcgggcagaggaaagtaaggtgtgatgtgggtatgttggtactgtgttcagtcctcctcacctttagcttctggcctgtgcaagacaggaatagtacatggagtagcagaacctgaggcctgccaaagagtacagtgggctggagtggcctgcaggggaaagtatgtcagtgtggtgacatcacaggtcaatgctcctatcaggaagaagggagcttaggaacttcagaatgcttactacagagacaccagccccaagctaggagatcctgccatgggcttcaggctcctctgctgtgtggccttttgtctcctgggagcaggtgagtcctgggcacaacttgaaagtctccgatcttcatttcttgtccctgaaatgcatgtgggccaacgatggcttcagcaggaggctttcttctgtgccttatggttaacttttgtcttctgacacacaggcccagtggattctggagtcacacaaaccccaaagcacctgatcacagcaactggacagcgagtgacgctgagatgctcccctaggtctggagacctctctgtgtactggtaccaacagagcctggaccagggcctccagttcctcattcagtattataatggagaagagagagcaaaaggaaacattcttgaacgattctccgcacaacagttccctgacttgcactctgaactaaacctgagctctctggagctgggggactcagctttgtatttctgtgccagcagcgtagcacagccctgcatgagcatcagccttctgtgcaataacattcctgccccactcaggaagtgacggtgaggggagggctgccagccagaggggctcaggccctggagagtggacaggcctttcccaggcactctctggtgcttctgtatgtgatctggtttactgctcactgaagctgtgtaagcgaaatattattttacctgtttatatatctgagggacagcagatgtcctggggctcatatttagtagctagctgaagtctattgtttcaacacctctgcactgtccctcctcactccggagatctgtccttttacctggtgtcccctttttgtgtccccaagagcaggatgctaaggtcatatatgaaactgtgatcatgataacttgttccctgacaagtccaatggacacatgatttccaggcaaaacatatccatctattctttattgtgatttaaaaaaaaaagaaagaaaagaaaggtgcagttttctgctctgtagccctcctatgggcaaggccaggtcatctcttttatggagactgtatgaggagggagctttcctaggttcacagcaaatagcaggaaacgttttttatggggcgtgtagtcttcctgtggcggatgcaatctgccatcagtgaaaggacatgaaaaattgttattcattagttaatattttttattcttttttttttttgagacagagtttcactcttgttgcccaggctggagtgcagtggtgctatcttggctcactgcaacctccacctcttgggttcaagagattctcctgccttagcctcccaggtggcctccaccacacctggccagttttgtgtttttagtagaggtggggtttctctttggtggccaggctggtctcaaactcccaatctcaggtgatcacctgccttggcttcccaacgtgctgggattatagagccattgcactaggccaattttttattctttatcaataaatcttttggggcatcctactttgtacaagggattatatcacatgaaatatacaatgaaaaaagataattggaaaaaagggaaattttttaaaaatgaagaaaagggtgtttcttgcatttgagggtatcaaagtctgtaatttttggtatattctaattagtttactcagtttctgatttatacgaatttcctctttcttctctttctctctttggctacctacacacttttgccagattttttaaagtttttagtaacaatatttaacatgagatctaccctttttatagacttataagcacacaatacagttttatactctgtagtcataacgttgtacagcagatctctagatcttattcatcttgcatgattgaaattttatacccattggcagcaactccccatttaccccattccccagaccctgaccgctaccattctagtctttgcttccatgagttggactattttagataactcatgtaaatgacattatgcagatttttgtctttttgtgattggcttatctcatttagcctaatgtcctaccaagtatagtggtgacagttttacttctatcttccacagttcactcgaatagctccttgaccaactgtaacccagaatcataaagataaaggcattcttagaaatataacttcttgtcctggctaagttaacttaacacaacccggtacgggatggattctcccaggttgaggcatctggtcacatacgagtttcaacctatcatggtctccaggatccatttttggcggcaccactgctgcccaggtgactgtggacacaacttagatgtctctgtcctagattttccaggccccagctactggcttttcttttaacctgtgccggcagtctccctccactcagacgcagggatctgcctcctgctcccatctccttcctgaacttccgccctgctggagttgcatggatatcagggcccctggtcaatgtgcggcagcccacggaggcactgggagggaagctcacctctagctgccttctggggcccagttctgttataccccaagcaagtgctctgttctccctttgggctccacagtatgagaaatgcacttcatggattcatagctgacccctagctcagtaatctgatgacaaactttgagtttcactcaaagtgaaactctcagagctgagggactagctctgcatttctctgatgagggtaagaatacagtgctgtagagatgccttcttccctgtgtagacctggcactaaacaggaaaaaccagacagggtaaaagtgcccaaatatgtctgagaagactgaaagaaaatttcctaagaaaatccttctcctgacttcattcagttcctagtaagacacacctcaccctctgacccccatatcagctggtccccccaggatatcacacgtcctagtatctaaccccacagcaactaattcagatactggcctctttccaacctccagaaacggtcttgccaatagagttttgttggccgggcgtggtggctcacgcctgtaatcccagcactttgggagcccgaggtctggtctggtcacctgaggtcaggagttccagaccagcctggccaacatattgtgaaactccgttccttccaaaaaaaaaaaattacaaaaattagctggtcatggtggcacatacctgtgggaagctgaggcaggagaattgcttaaacccaggaggcagaggttgctgtgagctgagatctcatcactgcacactccagcctgggcaacagagcaagactccatctcttaaaaaaaaaaaaaaaagagttttgtcctctgaccaccaggtctatctagatatctaggcagatttaatttacgattaatttgacctcttaatcccattaaagggagaatgaagagcgtatggtttcaatgtaaagtatattcattttattttgaatgagttggaactaagtagtaaactgaggatatcactccattatagtcttaaaacaacccatggtaaaacaaatctctttactaggactttctttttcacattttagttcctagttacccagagtccagaatagttaagagttgaagagtcatgactgagatggtctgtgggggtttataaatgagcattcacttgttgaacaagcctagggccactctctatggaagcagtttgtcagctggtttgggaatttttaatttaaaatatggtacgttctttatcttgtataagtataaagtctacaaatataatttgcatatataggctagtgcctgaagatttgggtaggacaaaaaggaaagaagagataatatttgcagatttaggaagtttcattatataaaacttcaagggctcaggggctctaatttgtgaagatagtataatgaagaagaattagaaaatcagaactctcttctggagcctacactggggttgtcctgagaaaagattatgatatgaggaacataatccatggtgtgcttagcagcccagagtgtagcagacagttcttgactcatgcagttgggggggtgagactggagacacttgtggaaggtactggctgttgaggctgtgctatagcctctccaaaaccccatagatgaatgtcagacaaatatactgccactatgaagaatattaaaagttagcagaattcataaacactcgcaataggcagcctgaaggtttaaattttagcatcatgacatatgacagtttgaagagctgtagttaaatgcacacaaaagagaattgaaacctgaacaagaaaaaagagactctcagaaatcattagataacttttttaaaagcattgaatgggatgtctagaaatgatccctaaaatgactgaaagaaagcagataaattgaagagcagattaaatgctcattgaagagattattattgacttcaaagacaaatcttaagaagttacccaaaacaacacaaaaaattaaatgtataatatgaaacagagaggaagcaacagagaagaaacaatggaggtttcagttatattcgaatatatgtaacatttcataagaattttccatttattcttatgtcattgaagtgtcagagaaagaaaataaggagaatgatatgaggtgatattgtgtgtgatgctagctgagaaatttccagagacatctaaagacctaaaacgtgagtttcaagaattcagataaatcccaggttaaatagttacctcagtgttaaaatagaagaatatgaatgatgaagacacaatttttcaagcagtccaagaaagacaaatatctcgcaaaggaatagactgagaccgacaggaacagtgaagaaagggagttaaaaatatctataaatgcagattatagtcctcattcatcaaagagacaaggagacctcggcagttcatattctgaccccttgggctggtgacctgaaatatatttggctgagtgttctcatttgtaaaccgaattcaatttgcagagatttttttttttttttttggaaatagagtctcgctctgtcgccaggctggaattcagtggcgcgatctcagctcactgcaacctccgcctcctgggttcaagcaattctcctgccttagcctcccgagtagctgggactaaaggcacacacaaccaagcccagctaatgtttgtatttttagtagagatggggtttcaccatgttggccagtctggcagagatttgagagaggtaactttaaaaattagagtcatataaagtgtaggttcaagaaatcttaggtccctataaattctctgacaaatctccaatctagcacagttatttactctctgaaattctggtaacaaagacaagcacagattacttttgcctgattcaatcatgtttcagacacaaagtcatctaaaatgcaaatatagtagtctgatagttcattatgtaaaattaacataaagagttgccgtttaaggaaatatgcaaatgttacctcttatgaacttcctgcttgataactgagtctgatgtgcatgaaggtgtggtgctcctagaaagatatggcttcagtgcaattgtccatcacacaagagagctgatagaagaaggcacagctttattggaaagaagaccacagaggagcctctagtggcttccatgacatcctctccgcccacctctgatttcagccttgctgctgtggacggtgccagttcccattcacctcttgctgacagtgcccttctgcagtgcctgcttggaatgttgctgcttcctgctctggggtcttctctggtatctgaatccacttgggctgtattcaaagacagccagaggtcctgatgctcctggtggaacaggacagggggacaaaagctccaacctgcccattcatgcagatactccagagagcaccctatgctcttggaggtcctgatggattccgtctcctgttgccccagcacaaatacaatattgcacctttatcctggtttctcccttccctattttgttttccttgctctcttacttcttcctggaatcatttcccaaataagctacatgcacccaagtctccccatcacagactttgtcttcagagacagactaaactgtggcagtgatggaatgaagcgaccatcaaaagaccctaccttttgaaggagacaactgtttatcttttattcatatggctacccattcatttaaaaagtcttatgatgatgtatataaactaatcttttccaaatccatttggattcatctggaattcccagcgttctcaggatggctctctgctcccttaaaacttcaaacctattttgaactgaataaacttggattctgtttacagaagtagaatctgcctggactcagataatcattcattcctttcttcattcaataaatatttaatgaattataggtgaagattagattcaagttttgtggcgcacaaagctgatacattttaggtagctctttgcaaaagagagtgcaaaatagcaaagagttgaaaagaccctgtgcaagtgagaaggcctgaggttattcttcatcggcttcatggcaaatacacaggtactgtccaggtacttgggaaacaccagtgcaaaaaacagacaaagcttcaagttgaggtagacaattttaacacataattgttataatttattatacttaataataaattaatttaaaagtagaaggatatattcctggtagatgcttatctccccggagaagttagagtgtcattgagaatatcaacattcttggtaaatcatacctgatttagggaatgatccttggagctctggaattctacatgccttaccttgcaaaatgaaggtcctgatctgaaaagttttttttttttttttttttttttttatgccctggcccaaccatgaggattggcttctttgctgtgtggctcttggtctcccaggatcaggtgagttctgggcatagatgagaaagtccttcctgggcttgtcgggccccaaccacggcctcctatgggggtgctcatgggcctcctccctgtctccacttctgattctgtgtcctctctcactggagcatgattgtgggaattacccatccaggttgcatcaagatgtgcaatagatagcctattgtatctgaaataactattgcagtgttatggactacatgtgagttttgcaccatagcacgtttacaaatccatcaaccttctcccatttggtgaatataagatctgctggatgggaatagaggattttcctgtgaccctagagactccaggtaggtgtagttcttggtgaacatttcatccatattcctaatgagcctcctcttttcttcacaggaagtacagtcactcaggggacttagatggggcagtgtttgtggcttcacctgaagcaaagggagaaaacacccccatgagaatacacagcagcctgagcttggatggtgacattcccatcaggtgtaatgaggtgctacagcatgtaacaagtcttcaagcggtcatgaccttgaacctggaacttggaacttggagacatttctggatgtcatttaaccgagggtatccctgtatgctggcatacaagtgtccagaggttaaacgaagaggaaaataattcaacttggagttgaattttgtgcaggaagtcataaaagtcaccaggactgctatgacaatgttctttagcctacagaaatattcataaaagtgaaaatagtattcaaataaagaatttctcatgatggaaataaaatatacatagaagaacaaattcccctattaaaatcagggaaagagcttaggagtttattagatttctttcaaaacagacctaaaaattattcaactctgttataaataatttgttcctgcggggaagagaaggggcatggcaggttagctccgcagttcaagcattcagcaggaacagtgacatcatcaagtcactgagagcccaacttcagtctgcccacagcagggctgggagacacaagatcctgccctggagctgaaatgggcacgaggctcttcttctatgtggccctttgtctgctgtgggcaggtgagggctggtcacaggagggcctccttccctggaattcccaaggcctcagtgcaggcttttctgttgggatgacagcatcagcatctgttgttctctattacaggacacagggatgctgaaatcacccagagcccaagacacaagatcacagagacaggaaggcaggtgaccttggcgtgtcaccagacttggaaccacaacaatatgttctggtatcgacaagacctgggacatgggctgaggctgatccattactcatatggtgttcaagacactaacaaaggagaagtctcagatggctacagtgtctctagatcaaacacagaggacctccccctcactctggagtctgctgcctcctcccagacatctgtatatttctgcgccagcagtgagtccacagtgctgcacagctgcctcctctctgcacataaagggcagttagaatgactgaggttgcctgtgctcccaagtcccagccttcacaggagtcggagagccctggctagcctgggggccatagagcaggggccatataaaccttgatgttgaggtccattcctaccccagtctcagaccaactggaggtcaccccaacacccttagcttctgcagttccctctttccttttgtaaaatggaaaaggcatctttagtcgagattcctaatttcgttgaaaatttgaaacccaccatattcttctctaccctaagggctgggtgacttttccacataccctttcccctaccctctactgcctttcaactcccaatcataaatctttgcccatgtggtctctgctcctgggggccctttattctaagggcaatagacccacgaggtcctatatcattagccatttacgtacctcttcatcatcattttgcaccatgttttccctggctctctgctccagccacactcccttacatgcagttatttcttcatatgtgtctgttgttttccaccctggggattgtttatataaattctttcttctgcactgagcatacataccacccacttagtcctacatctctacttcatttcttaaattaaagtgtatttcaggcacacttgctcttaattgtaaaaagcaaaaaagaaagtttactagaaaaatttaagaaaagcattttatgcattcagttgagggatgacatttttagaggagacaaaaagccacaagccaaaagaacaacattcataacgctagttgcattaaattgtttcaagccaaaacacaccataaaaaataaagttaagctacagcctgggaaaggcatgaggaatgcatacaaatgatgaaaaatcagtgtgacagagaacattcagtgtaacagagaacattcagaacatcactgaatacctgtagctcctccatggtttctggtctcccttgcagttggaggggtgggaacatgtcaccaggttctgaatagtgggataaaatgatgtcagctcatttcaagcctggcccttaaaaatattctgtggcaccatgttgagggtctctaaatgtactcccatgtttagagtgttggtatatggcatagagttgtactcatggctaagatttattaaagtgtcatagtaaatactctgcagcagaacatgtggagaaaacacacaggcagaatctggaggaattcacaggcaggcttccttatgctctcttcctctcaggaggggtcacacagagctctctctcctcccagcagcaaaaatgcattaacacacgtgcagtgtatctgccaagggagcccattacagacttagcacccaagaggttttagtagaagctggtcacacaggcacctactttttagcatgaaccaaaagtctagatcccaaaagaaaatctgatgttcagcataatattatttgcaacaccagcctaggaacgatgagccacccctgtcagtcaggagaaactttgcatcagttcagggcaccgttcaccagccaagctcccagatgtctgccagagtccaatcttgcaagcaggactttctaagcaccgcagtctccagcctcctgtcaactcttgtgcacagacactcttcaactctcttttgccatgtcctgaactcgggagctacacggtacagattgcctaatgataatatggaagcagcctggctcactgagtcagaatttggtggacaatcacagaagaaagctgctcatgccacactgggctttgtggtcatgggaagtaagacttcatagagctatgccagtgagattttaggatttgttttgtttgttttgttttctgtagcacagctgttcttgtctaagagaattagtatctagaatgagtaaaatattcttattacttagtattaagaagacagctcaataaaaatagcaatactgaggctgagtaggcaattcacacaagagtgaacataagttaccactaaacatgagaataacttcgcaaccttacttacaatcagaatattgcaacctgaaacagtaagttatgatttcaaaattactagattggatacttttccaaggaatgacagtcctacatttgagtagacatatgggctggtgaaaattgtttgtatatttattacaaaagataattacaactacatcagaaaacccactgtgggatatattgtgacaaaccacatttctggaaaatttatcaacgtatttaaatcacttgggttcctttcattgtctttaagttcaataatggagaatgcaactgtcagtgtttttcctattttgaaggtagtctttccatcttttaaaaagtatgataaaatgcacgtaacatataatttcatcactttattttttaaatgtacaattcaatgacattaagtacattcaccttgttgtggaattatcagcattatccatttccaaaattattttcatcaccccaaacagaaaccctgtacccattaagaaataacttcacattctccctcctctggcaaactctaatctattttgtatatgaacgaatttgcctattttagataatgaatttacatgaaaccaggcactatttttccttttgtttctggcttctttcacttagcataacgctttccaggtgtatccacattgtagcatttattagaacttcattctttttcattctcaataatattccattgtgtgtatataacacatttgtttattcattcattagtcaattgacatttgggtggtttccaccttgtagatattgagaacaatggtgcagtcaagactggcctggaaatatctgtttgattccttgttttcaattcttttgggtctatacctaggagtggaacttctgggtcctttggtaattctgtttctcgttttgagtaactaccaaaatatttctttgttgcagctgcacgattttggatttccaccagcagtgtccagtttcttcacaacatttccagaacttgttatttccttttctttttcttttttcttttcaaaaatatgatgatgatgattactgtttttatagccatcctagtaagtgtgaatgatatctcattgcggttttgatttgcatttccctaatgactaaagatgttaagtgtcttttcttgtgcctatgggcaatttgcataccttctttgaaggtaatatttattttatttgattgtgtttttagagtcgctattgactttagatttaagctggtgtacctgtgatgatactaaaggaaattgagattgagattaaacttctcttgggcgatttgttgttggctaagtgtttttaggtgcagtacttctgagacattttgggatactgtagagagagaaataagtaatttattgatatttctgggaattagattttttttacaaagagaagagagatataaataagaaacgggaagatgaggaagaaatctgtggtgctgacttgaattggagttattaatgcaaacttaaggttttaaagattatatatttcctaactttatccagagaagggtctaaaaaacaatacaaagtaaataaacgaatggctatatttgcttttttttgtgctccccagtaacaataggtacattattttattccaaatgttattccttataaaaggctgcttccatatcaagggaaggaaaagtgttagaacatcttttggtagaaatcaagaaaaaggtcagaaccaagaagacatgtccaaaatccacagaagcaatttcaaggggctccattagccaaatccgggtcaatgcaagctttaaagaagaataatgaggatactgaattgtaacaagttataaaaatctataaggctataatgacaatcaaaagagatagataagaatctcttcattacggaagaatgctagttgatatatctaatgagaaaatcaatgcaaccatccacataattatagacaaattccattagtagatgcctaaactaacagtttttgtttccttcaatactttgagttatactgttctactctctcctggcctgttgggtttctgctgagaaatctgctgaaggccatactggggctcctttaaatgtgatatgtttctcactgcatgctgcttttagtattctttctttgtctttgatttttggtaatttgattatattgtgtcttggtgaactcctttttgggttgaatttgattggcagcctccaagcttcctgcacctggatgttgctgtctttcctcagatttgggaaattttcaaccattatttccttatatatgtttttggggcctaacagcatatgtaccttgtttcaaagcatcaatacacagattattacttaattacaaagggtaaagggcacattcacaatggagagatcttggatcagtcatctcaaattaagcattgccaaaatgcataaaaatgacattccatattcttgtgattgaccagatgcaatgggaaatagacatcatctatggtgtatattttccaagtaattaacctctaataatatgaaaatttttatcgtgagctgttttacaagtaagctgaccaggacacttcaaaaatctatggtcatgaaaaacagaaaatataataagtgggtggaggagatgtatcattgaaaagtaactaaagagatccgacaacttcctgaaatacatgatctttgatattgtcccagaggaaaaagtaaatcaaaaccaagggacatggttttggtggggacaaaccacggccaaaccgcaggcggggctctggcaagacagtaggaatagatggagttgggaggaactccccccagtgccgcgcaaacactgtccaatattagccctgattctactgaggacagtgtagacatggccccagtatttctgacccatgaatggagggcctgagcctggtaactctgaaccattcattgaccagcaggcggcactagggtttgctggggttggcttgcttttaaatcagggctcagtgctgtctgaggagttaagtttaaaggaaaagtgtgacttcatcccagcatccagaatctagtttgcagatgtttgagtgtcctgtggaatgtgagccattaaacagaaactcttcatcttccagcaatgccagtatcctctgttcagcagggaaaccccaactgtagcaaatcattgagtgaataatgttctgggcttgcatcagggatagatggaggagagccaggagccagcctgcatgctcacagacccatataaagggagaaccacttcctcctcaggagaactcagagaaaccttagcaattcacctgtaccccacacctaacccattccagttgtgccctggatggtggacaggaggatgtaaagggaacataggagaggggagtggacaattccagacctctccagataggcttagctcaaataaccttgcaaatattctgaataagagccagatttcccagggctctggccttttcttccctgagcagcatgatgatgctccattcctgtcttgacaaggattctgtcatggatttcttggttgtgctgcccaggaagcaggtgaggcccaggaacaatgaggaatgtcgtccctggacttggcatgcctcactcgcaagcacaccatatgtgggtcctgtgattgataggtttgatagatggatacgtcctgtttccagccaccagcctctatcccctgaatgctgttgtcaactcagagccacaactctggtcacaaagatggagcaggtagtggcaccttaatgtgaagaaagtttccatcatgcaattgttacctggtgcctacatgagttagactcaaaccagcagctgtttacctcagtgatagaggatttatgacagaaacagagggctcttgtaattctatacccacaggtattcacctgataaccttcacatgtgtcccctaggttttggggactttgagcctgcctcactgaacacatatatcctcgttcccagctctctggacatgcatctccttgtattattgtcttatgccaactctcaggtgcttcatcccctaactcttcccatcctttaccccttaggcaatgaataaaagtatatttgtgactaatgttgccccattagaaaaaaaatgccagatactagccactgctgttcaattgtaacttatactaaatctgtaaggtttttttttttttaagatttcaacaaatctgattttagatttcttttttcttttgttttgttttttgagacggagtcttgctctgtcgcccaggctggagtgcagtggcgcgatctcggctcactgcaagctccacctcccgggttcacgccattctcctgcctcagtctccagagtagctgggactataggcatgtgccgccatgcccggctaattttttgtatttttagtagagacggggtttcaccgtgttacccaggatggtctcgatctcctgacctcgtgatccacccaccttggcctcccaaagtgctgggactacaggcgtgagccaccatacccggccgattttggatctcttactgtattcacaatgatattttcagggataagagagtccccacccatcttataagatatcagaactttcattacattgatgaccaagaaccataggcagaaccatgatgaagacttggtacacaatgcatcatgaagcttgataacagaaaagagaaagctggccattgaccttcaccaaaaatgaacccttccaactctctctcagggtattattttacccctttagcttagagcatgtcagctggttcaacatgcttctaggataaacctgtgtcaactaccccagctcccactctgtctaagctcatagcaatgagaaaatggagaacctggtaagacagaaatgcccagagagaaggatatacagataagacatagaggttactaattgttgtctgtattttgagttgcctttgacacattcaagtagaaacatgcagcagaagatggccctggagatgcagtgggtgatccaatcccccaagccctagagatgtgagtaaagacacttggatgaacttacacacagtccatgaatacgctaaagcaacttctagctctgttttagttcataacaactggtttctaagaacttaggcacttgtggagacaatgatgttactgtaggaactaccgtataaggacaggatgtcccacctcctctgctcctgttcacaaggaccctgaactggcaaagctcccatcctgccctgaccctgccatgagcaccaggcttctctgctggatggccctctgtctcctgggggcaggtgtgtcctaagaacaccatgatcatcccattggaaattccagtgatttcttcaatcatttctgtctttctgttttcaaattctgtctttttccccaacagaactctcagaagctgaagttgcccagtcccccagatataagattacagagaaaagccaggctgtggctttttggtgtgatcctatttctggccatgctaccctttactggtaccggcagatcctgggacagggcccggagcttctggttcaatttcaggatgagagtgtagtagatgattcacagttgcctaaggatcgattttctgcagagaggctcaaaggagtagactccactctcaagatccagcctgcagagcttggggactcggccatgtatctctgtgccagcagcttagccacagcgttgcagagactttctctcctgtgcacaaaactccagggctctctccgctctactcagctcacagcagcctttccttattcctcatcctctcagggaagaagtgagttttcagatatagctagggttcatatagtgggaggaaatgaactattttcttaaaacatgagcgctatagttgttggttgaaaacatgtcttagggatttgaaacacttctgggtgggaattcaagaaaccaaaactgaaagtgatttatcccagacctagtcctcaggggcagtgatggttgttcttctataaaaaatgcacacaatgttgtacgttaattaagaaaataaataaataaacttgaaaaataaaaacatttaatcaccaaaacgtgtgttaaactttaataatatagatattgattacatgcaagtgacaaacagcaggccctccttctgccgttgtcagcatctgaatgatgtgaatcttatctggctctggagcctcttcttgacctctcactggatgtttcatgcagtcaaatctcaacagacactgtgtgtttggaaatcttttccctctgtttttgtggaaatatgacaataataataatattgtaatgatgatgatgttgatcatttcagctatttcattcagcacactttaaacttcaaagaaatgcacacaaatggttatcctggaaacaattcccaaatcttaactcaaaatgaattttgcttctctggagtgctttaacttttcagtgtaacagacacagcccaacactataattaggcctgggccagctagttcagaggctggtgaagacacttccacctgcctgcctacttccttgtctgcccactaaaatagctccttagtgcattagatattcctgccagaacttcagaagcaatgaactgcccctggtccagttgtctcctctgataatgcactgtgtgtgtccaactctagtctctaccctaacttctgcccagattctcctgtactagaactcattctgaagtactggttagaatgtttgggaaggcagcttcctgggaatcctccgaaggaccatggctgtcagtgattccctcgtaacacttcttgagagcatcttgtatttcattgaacgtaggactcccatttatttcagtctgtctgctcctgttcacctctgagatctctgtggcttgtttgtgttgatttccttttgtgctgcttcttggtcatttgttcgtatttttccttataaacctgattatttttgacatcgtgccagacactatggttgtagaaataatttttggtctaggatggacatatctttctccagagataattttattgtgttttgtaaagtgcatggatacataaacaatccaggactccctgaaaaagaattaaaggcttgaggtgtcctggagcccctggagaacaggtttcctactagttccttgtttcaattcaagttcctcagtggtcaccctcagtaagttctggtcttagccattaccccccagcctgtgaatcagcttcctgagagctgggctgggatcagcaaatgcccctaagggcagtgactgctgtgttcactcccccaggctcctgccttctccaagattctggaccagttgtccctcataatgtttttgggatattaattagtttcagtttttgttagtgtggtaatttacccaactatttaaataataacagaagggttaattttgttacaagaaaggggtcctgatccaaccgccaagagagggttcttggatctcatgcaagaaagaattcagggtgattccacagtgaaaagccaaagcaagtttattaagaaagtaacatggtgaaagaacagctactccacagacagagtagggctttcccaaaagtaacaggaggagcgcatctaccctacgtacaatacttgtttatatataggataagaaaagatcgttgagagatgtgctctgctacaagggtttgtgataaaggattaactttcttaattactatgttttgcaagaatcagtattattatctttaaagagaaattaggaatgtttctgttctcaagatattggggtatcatgacactcccaagtctgggtctgtttagtaaacattattaatctgttgctttaaccataaacatctagaggttagggatacctgattttctgggaatgcagcccagcaaggcccagcctcattttttcacttaagatggagtcactctggtttgaacgcctctgacaatttgagtttcctcttctgtaattactcagatgaaggtcaaagaatttcatttaaagttttaattttctttgaatttcaatgtctgattcttagtctgtgatttgcttgatatttaacttaaatagcatagagaaatgttttactaaaactttaatttcgaggaaaggacttttttaaaaacttgaaggggatttataatcaaattgggacactcacttggttttgacattttatcatttagagtattattatgttgttaattacataaccttcgatgcttcattcgaacagggtaatgagaatagagagtaaatatttaaacttcatcagatctttgacacacctgacaaaaacaagcaatggggaaaggattccctatttaataaatggtgctgggaaaactggctagctatatgcggaaaactgaaactggaccctttcgttacaccttacacaaaaattaactcaagatggattaaatacttaaaagtaagacctaaaaccataaaaaccctagaagaaaacctaggcaataccattcaggacatagacatgggcaaagacttcatgactaaaacaccaaaagcaattgcaacaaaagccaaaatggacaaatgggatctaattaaactgaagagcttctgcacagcaaaagaaactatcatcagagtgaacaggcaacctacagaatgggagaaaatttttgcaatctatccatctgacaaagggctaatatccagaatctacaaggaacttaaacaaatttacaagaaaaaacaaagaaccccataaaaagggggcgaaggatatgaacagacgcttctcaaaggaagacatttatgctgccaacaaacatatgaaaaaaagctcatcatcactggtcattagagaaaggcaaatcaaaatcacaattagataccatcctatgccagttagaatggcgatcattaaaaagtcaggaaacaacagatgctggagaggatgtggagaaataggaacgcttttacactgatggtgggagtgtaaattagttcaaccattgtggaagacagtgcgacgattcctcagggacctagaaccagaaataccatttgacccagcaatcccattactgggtgtatatacccaaaagattataaatcattctactataaagacacatgcacatgtatgtttattgcagcactcttcacaatagcaaagactcgaaaccaacccaaatgcctatcaatgatagcctggataaaggaaatatggtacatatacaccatggaatactatgcagccataaaaaagaatgagttcatgtcctttgcagggacatggatgaagctggaaatcatcactctcagcaaactaacacaggagcagaaaaccaaacaccgcatgttctcattcatacggaggagctgaacaatgagagcatatgggcacagggaggggaacatcacacaccagggcctgttggggcgggggggtcaaggggagggatagcataaggagaaatacctaatgcagatgacgggttgatgggtgcagcaaaccaccatggcacatgtatacctatataacaaacctgcatgttctgcacacgtatcccagaacttaaagtataataaaaataaataaataaaataaagttgatcagagagcagagagtgaacatggaatttacttcattcctgcactgtcgtgactcatttgtgccatgttttgtgagcacacctgaggggcaggggtcagaattggagggagtcacaggtgtgtggctatcatcttttccttcccagtcccctggaaaggtgcttggttccacattttccatttgggggaacttccctaaagtgatacactggtttttgtctattatttgccaaatgtttcttatgggaagtgaaataagttatcttatttagtctcctcttcatctgaggttagtctctcttcatcatcatcctttcatcctggctactgagaaaaaaaagtagattcttttggtgctttttcaacatacactaagatcagtggagaactttctttccttacagggttggcctgtagtttgcaggggagagagaatggattaaattctgatacagaatagtgtgggttggcctatttgctctcctatctgagcactattagttattaacactgatattttatctccacttgtctgacttcaatgtccacctctcaggtggttccatcttaggccatagcaacattaagattgctttctgaccttctaacaccaacaaatcataattcccatatctccatgactcaacaaagcaaagcacaagtcccctgtgtcctggcaagagagcagatttgtgctgtttctgcctactggccacaaggaggcactgtggctttgttgtcatcagagtcaaatggggaggggcgaagatggctctctggaagattcttaagggaaaccctgggtttggccctagattcagggagctgggctgtctggaatgaaggctgggaatgaaggaattagagaccaaccaatttgcctgtattgttgtggagaagggttttgctctaaactgagctctgaatggggctgagtggcaggtgtgcttgcagtggatatatgtctgagcgcccttaagatgtggaggcacaagtagctggggtggtgcagtgcccaggttctgggctgggaaagcagagaagcagttttcatgttacaggagccttggagagcctggccccaaacccccaaaccagctcaggccagccctacctgctctgttaaaagtagaaggaagagcagggagagacggaggtgctaccctggaccatcggagggaccctgttccccagtgagggggcaatcacaattacaacaccagtagcatatacacttattaggcagacactagggtggagtagaacagagttttctccaccaagaccttttgctctcagcaggaaaatggcccagtctattaatagttcacctctgctactcacttcagactcctgtgtgtcccctggaagaaggtggggtctgggtagagatagtatcttttcttttggtttgaattaaagttctttccatatgactcgttcatttgcctctacctgtatcttgtatctagcttctgcctcttgtattcatgtgtgccttggacactataaagtatttgatttctactgctgctgtaatgaattaccactgattttggaggtttaaacaaaatacatttgctaccctacaatactggaggccaggagtccaaaatcagtgtaactgggccaaaatcaaggtgttggcaggcctgcgttctttcccagagctctaggggagaactgtttttctccccttttcagcttctagaggctaccagcgtgtcttggcttgttaccccattcaatcttcgaaaccaacagggactgactgagcctttgctcatgctgcatcactctgacactctttgtcctccctcttccacattttaggacccttgtgactacattggacccgcctggaaaatccaggacactctcccagtatgaaggtcagctgattgacaacctgactttgtgtggaactttaatttttcttttacaagtaacttaacacattcctaggttccagagattagacctggacgtggttggagggcctttgttctgcctaccaaacctaggaacttggtaagagggaggaaaacaaaatgatcacctggaaaccagaatactgaccaccgttttacatcccaggcctaacagacacaaaaagggatggagcccacaaggaaatagacacctcaggtctcacaagctcgtctgtaaactatttgctccttaggatcggaaagtactctggggtgcaggggactcagcagtatgcctctgtgccagcagcaaaaatgtggccctaaactgctccttcttggttagcaattaacccagttgaccaacccacagagcagaggcttctctcagctctgtacactctacaccctgagaggaagtcggcttctgagatgcaagactcttttataaggaaaagtccagttgtaaagattaagaaactttgagctttgctagaggtaaaaataggatgtaagtcaactctggagcatttaatttccaaatgtttatgaaaaagacaatcttcttcctgttttattgtatggatagagaatgagagagattctgtactctgggctttgcaaactcactagagttcaagaataaatacactcagagaggtctttcactgcaaagaagagctttgaaatcgaatgaactttcaggatatcagttcggctcctgtatctctaacaacgcagttgacatgcttgcccttcctagggatctcaggggccaactcctaactcacttgtggataattgaagtgcattcaaaggagtaggagcacagagacatcagggagaggaataggagagtttgcagagaatctggcttgctgtaagacaatgagttcatcttgaaataattggagtgtgaggtgcagatgaatatagttggcaagatcctaggtaagatatactatagagaaggctttatgaattggtaatatcaagacaaatccacagagagcctccgtaggtgtgcatttgtgtctcagatcaattatagttcagtcctgcctgattcatctcccagagatgcagcctccacttaaataaggagctttcaaattggaggtggtggcccattcagtgacgtcactgacagatgcatcttgtgtggataaaatgtcacaaaattaatttctttgttcatgctcacagaggccctggtctggaatgttccacttctgctctcactctgccatgggctcttggaccctctgtgtgtccctttatatcctggtagcgagtgagttctccgatatttattatggtcatgctggacctctgtctagatgactccttatattttccttattctttcccccaattctgtcttcttttatagcacacacagatgctggtgttatccagtcacccaggcacaaagtgacagagatgggacaatcagtaactctgagatgcgaaccaatttcaggccacaatgatcttctctggtacagacagacctttgtgcagggactggaattgctgaattacttctgcagctggaccctcgtagatgactcaggagtgtccaaggattgattctcagcacagatgcctgatgtatcattctccactctgaggatccagcccatggaacccagggacttgggcctatatttctgtgccagcagctttgccacagcactgcagaatctccccatctctgtgcagaaaccctggtgcttcctcttctccccacagctctcagcagtcgtcagcaaagtctttcctgctctctgctcaccatggctcacgcctataatcccagcactttgggaggccgaggtgggtggatcatgaagtcaggagatcgagaccatcctggctaacacagtgaaaccccgtctccactaaaaatacaaaaaattagccgggcacggtggcaagcgcctgtagtcccagctactcgagaggctgaggcaggagaatggcgtgaacccgggaggcggagcttgcagtaagccgagatcgtgccactgcacttcagcctgggcaacagagcaagactccatctcaaaaataaaataaaataaaaattaagtgggtttggagaatgacaaagacagaagatggtaggatattaacataaaaaaaatcatgtgtaggggataatgtagaaaatgtgttttgtgaatttctcacaaattgtctaaggagtcagaattcacaggcatgtaagataaaccttaattacccccactgtaggtttccttgtctccaggtatttgccatccgcattagcaagctgagagctcctgagaatggctatgtcttttgaactagtctgccctctgcattctattttcaccctaagctgtgaacagaaatttcccccacaagttttcttgattgtaaaagaaagttcttttctatggcattccttataatgttaatttcaacttaccatttatatagggattttgcattgcacttaaagagtaaacctcctgtgggtaatacaggcagtgaaataggttagatgtaagctgctcctcctggactctagggatctatttgtctttatcctgcttaaggagagccaagttctagctgaaggcctgtgccaactcacaggacactgacgtggtctcttccactgcctgcttggagctatccacatgtatccacacaggctgtctaaaagcacacaggcctggccagtcttactttgacctctttcctccctgatgctgtgtcctggacacgcatatctatatattttttctggtttatgccgcgtatttctacacagcacttgcaattcattctgaagaattataatttctttcttctatagtagtacttacatactgatcacttctcaacccctatcagggtatcattggcaggtgttgcaaactattcctgtattttgagtgcccaagacaatttgagtttacctgagttcttccatataggcctaggtttcacttgtcattgtctagttttgttatttaaaggccaaggttttcaagatcacaacagtacagaataaaattcaggaattttttaaaatgtacatcaaccgacctactctgtgtttatctattgtcctggtgtctcccttgctctttgggcttctctttgctgcctccagatcactttctttcctccttttttgaagcccagctccttacatacatgacgttagaacaggacccttcattgctgcacttgcttttttcccttcagaactctcttcccattcagtcctgtctgctactaatcctgtcatcattcttaacgactactcatcccacagaccatttttacattggtttggctcctcacttttgaggattttttttaacctactttttttttaagaattgcttccatgattacagtaaatatctactgaataaatgcatgtcttcctcagcttggagatttctgagggttgcaactttgtcgaatattttatccattaatcctaactgtgtatattagacaaggaaggtattaaaaatcatgttttaaatcagaaaatcaataaatagatttaaagagacaaatgcaaaacaaaactgtttagagctgctgttctgggctgaactacagatggactgtgtaagaaatagtaaaatcatctggtaatttcaacttatctttagaatctttggccggaacagctccagggaatcaagggatcataggtggaaagaaagacaaagaggttaaggaagtgagaactggctagggtagcattctctaccttaaggttttcaaacataatatcaaggtcctcagtttatttgtaatttttttgaggatgaaaggaaattatgcacgtgacccaaggtatacacaataaggaaactgacacatgactttgctgagatggaattatattaaagttctgtgacactcacaaactcatctcatgctgattagaaactgtgattggcaatgctgtgtgttacaaaaaaattaaaaaatgattcctttaaaaacattatttctttaaatcagcattttccaaaaatgggggaaatattaaatactatccaattttggtggtgcaaaaaataaaaaagcttaggggcttccagtacccctgacccagctgaccttcctttcccaggcccatgtcttttaatgtgcatttactcagggaaagggaagtgtggctgtgcaggaaaagtggcaatttagaaaacacaggctcaagggcttgatggagggtcccagaagagggcagggcactggtgatcagaggggattagagggcaagctgctagggtaagctgtgcatcagaagtggttccttttgtttccttcagcagtaaatttttattatcattattactttagctgtcctccatatctacttctttagtatggctggctacttctctttccaactctttatgcactaccgtggatctcaccctaggcagaaacaaatccccaaactctcaccagctgcgctcatgaaacaacccttcctggcaggctgtgatctcgccaagagcgatcaagttgatcaagctataaactgacttcatcactagtctaaagaggaaactgtggcaagaacagctgcaggagaaaccctaattacaatgggaggagagacataaggattttaaagcagttttcaaactagtccttctcaagaaccaaacatataagggatcactgggagctgtctctgaagtgggttaaagagaaaagaacagacaaagataaggttctgatgcctgctctctgttcctacagatctctccagaagtcactgtagacctgctacaatttccctcactttgctgtgacacagcctttcttcgttggttcctcctccctatgacttaaacctctctccctcccctcccctatctccattcttccagaaaattcctctgccattcccagagacttgcagaacactggggtttgaaatacattaaatagattttttttaattaataatgatctctgttaagtaacaaaagtttcatatgtgaattgtgcacaaaaaaattatagtaaacttctgagataatgttagaaggcttatgtaatgatcaggctagctttgatgaaggaatttgggactcagggtgagaagacaagataagttagtagacaataaaatgagttgatttattctgtagtagttgggaacttgtttaaaaaaatggagaaagaaattgttgaaaaccctaactccctcaagaggtctgggaatcctgtagcttacatggaatagaaactgaaagggaatcgcttgaacccaggaggcggaggttgcggtgagcagagaacatgccattccactccagcttgggtgacaagagcgaaactacatctcaaaaaaaaagcatgatcaaatttgaatcatagccaaatcttacaaaaattttatgtgaaatatttaattttgccaaaaaaaaaattgatgcaatgacctctacccttgttcacctttttttatcttcactatgtcacagagagtttggcacataatagatgataagtaaatttattttgactctattgagtaaatgacaataatatttcacattctctcaatataatagttgaattctatgtgtactttcttacttagcagagtttcacttcaaaaggggcttcgtcctccacatgaaatacaacagagagtcattatggctagtctcaattttccatacaacttctgcaatattccaagcaaatgtgtttccccagtcaggattaatgaccaatgttacacagtatcctaaccacatctaaagctggaatttgcaaacatccttttggaacaaagaaatttatgttataatagtatttatccagtctcatgatctggtaaaataaattcttcaccacaaccacattttcccaaaaccacattttttgaggctggaaacatcatcatctcagaaagcaccctaaaacactgtaagaaaaattcaccgtgctcggtaatagaatcttatcatccttgcaataagaagataccgtgtgtatgagtgcgagtgtgagagtgtgcatgtgtttatatgtgtgagtgtgtacacgtgtgtgtgtgcattttctcatggagactcatccacatgaaaatagtttctctttggatttcattactaagaggcactgggtgattggtggagctcataggcagttctggggagtgacaggaaatgtcagaccactcaatctgcctaagttatagctgatagggttgtttatttcaagactttctataaattaagaattaaatatgaaaaagcccagagacctccattataaaatgcactatctaaaattctgtaaataatccaagtacaaaatatgaagagatatgtgtctgatcaatcaaaaggagacatggaatatcgcgtttccaggctggatctgtttgatctcttcaagctgttttactttatgccctgtgttattcagggttctctctttcatcttatcatatgaattgcaattatgtaacatttatcagcaatcaaaatattggttaatgcacccttttgtctccactggctaagggtggatttgaagatcaaccctaaattggcctgcttgggaaagcattgaggttgtgtgtgtgagagggtagggtttgtaggagcggagatgcgggaatccctgttcctgatttggacaatcttgagcacatcagttcagaaagtgtgaatccatgagactctggacagttggccacgtggaggcactgtggcttcacaatgcagtggggaaccttggagagcggtgggagggtgacccaggagaggagggctgaagggaagcctggttgtctgctggcatcagcagggcaatctgagttcagagtggatcctgagttaaatactgccagagaagggtaggggtgccaaaggcctcaatttgccccaaggaaaaagtgtctctgtgtctgtatggacagtggagggtgctgaggctggggtgtcaagggctggggaatgcttctcaggacagggacagggtgggcaggcataggaaaataggggttgttgtgagcatgtgggcactgtgctgcacctgccccacctttcgtttaggggccctgcagaccaggaatggaacatggaatagcagagcctgaggcctgcctaagtatgcagtgagctcacagtgtcctgcagggccagtaactggaaaggccagtttcctatggaaatgccagaaatattcctgccctgactgaggttcaggatctggtggcagcctttcccaggcactctctgctgcttctttttttttttttttgagggcatcttgctttgctctgtcaccaaggctggagtacagtggcttgatctcagctcactgcagcctctgcctcctgggttcaaatgattctcctgtctcggcctcctaagtagctgggattacaggcacccaccacaacgcctggctaattttttgtatttttaataaagatggggtttcgccatgttggccaggctggtctcaaactcttgacttcaaacaatctgcctgcctcggcctcccaaagtgctgggattacaagtgtgagccactgtgcccggcccctctgctgcttctttatgtgacctgttttaattctgacagaaatcattcaaaataagtattatcttacctgtttatacatttgactgaagcagctttcctgggtctcacatacgcttagatggaagaaaccagacctggcattggatagatcagtagtagtgtgacagtagttaacatcagccaattatgcatttcaaaatagtgagaagagaataattcaaatgttcctagtctaaagaaaagataaatatttaagataatgcctatcccaatgaccatgatttgattatacaaatgtatcaatgatcatatctacctaaaaaatatgtacatctaatatacatcaataaatagtgaattaaaaaaaagataactggccgaagcctgttcctccaacacctctatccactgttcccactctgtagatttgtcctctcacctggccttccgtttccaggtccccattagcaggaggggaagattatgccacatatgtgatcattatagcctctccactgacaagtccaaggaggatatgacttccaggcaaaacatcttttcatctttcattgtgacaaaaatcaaggttcagttttctccactatagcagttctatgggtgaggccatgtgattgcttttatggaggctgtgtgaggagggaggtttctcagctgcacagcaaggaaataagatgttgtttaaggaaagcacagtcttccagtacctgatgcaatttaccatgagggaaaagacacaaataattgctattcattagttaattttattattttttaataagacacaaagtcatctaaaatgcaaagatagtagtctgataattaggtaaaactaacataaatggttgtgtcttaagggaaagtaaaaatgttgccccttacagcacttcctggttgatactgagtctgatatgcaagaaggtgtgatgctcccagaaagctgtgaattcagagcaatcagcaatcccacaaaagagctgatagaagaatgggcggttttattagaaagaagaggagcctctagtgccttccacgacatcctcactgcccacctctgatttcaggcttgctgtagtggacagttgtgtgcaagtccccattcgcctcgatctggcagtgcccttccacaggtgcatgctgggagtctctctgcttcttccccagggctgttccatgatattatctgagcccacctggcctgtactcaaagacagccagagctcctgatgcccctgctgagacagaggactaatgctccagcctgcccattcatgcagaaacttcagacagcattctgtgtgctcctgagaggccctgatggattccatctcctattgctccaacacaaactcttttgttgtttgtgcacttttatcctggcttcttccttccctattttatgtttcgttcctacttcttcttcctggaatcatttcccgaataagctacatgcacctaagtccccatcacagactttctcttcagggatagcctatactgtggcagtgatgggatgaagccaccatccaaagacccttccctttgaaggagacctttgtttttcttttactcataccgctacccattcgtttaaaaagtcttatgatgacatatataaactaatctcttccagattcatttggaattattcctgaattctcagcagcctcaggatggctctctgttcccttaaagctctgaacccaatttgaactgaatagacttgggttctctttacagaagcagagtttgcctggacccaggtaatcattcattccatttttcttccattcaacaaatctttaatgagctataggtgcagagtagattcaaattttgtggggcacaaagctgatacaattttaaggagctccttgcaaagaagaatgcaaaatgacaaagtgttggaaaggtcctgtgtgagtgagaaggcccgaggttattcttcattgatttcatggcaactacataggtactgtccaggtacttgggaaacaccagtggagaaaccagacagagcttcaagttgaggtagacacttccaaaaaattgttataacttattatactgaataataattaaaaagtaaaaggatatattccccatagatgcttatgtctccagagaagttagagtgctgttgaaagtactgacattctgggtagctcacacctcatttagggaaggatccttagagctctgggattctacgtgccgtatcccaaaaatgaaagtcctgcactgaaaagatttttttttcccctgccctggcccaaccacgaagattggcccctttgcttggtctcccaggaccagatgagttctgggcatagatgggaaagtccttccttggcttaccaggccccagccacggcctcccatggggatgctcatgggcctcctccctgtctccacttctgattctgtgtcctctctcactggagcatgattgtgggaattacccatccaggttgcatcaagatatgcaatagataatctattgtatctgaaataacaatagcagtgctattgactggatgtaagtttggtgccaaagcacgtttacacctcctccaatcttctcccatttagtgaatacaagatcttctgaatggaaatagaacatttccctgtgaccctagagactccagatagttgtagttctgggtgaacatttcatccacattcttaatgagcctcctcttttcttcataggaagtacagtcacttatgggacttaggtggtgagtgtttgtggcttcacctgaagcaaagggaaaaatcatcctcatgagaacacaccgcagcctgagcttggatggtgaggctcccatcaggtgcaatgaggtgctacagtgtgaaacaagacttcaaatgttaaagaccttgaatccacaactttgaaacctttctggatgtcagttgactcttttaaccaagggtatctctgtaggctgaaatacaaatatccagaggttaaacaaagtggaaaataattcaacttggagttgaattttgtacagagaagtcataaaagtcaccaggactgctatgacaatgctctttagactacagaaatattcataaatgttaaaacagcattcaaatgaagaatttagcataatgggagtaaaatacgcatagaagaacaaattcccctattaaaatcagggaatgagattacacattttaagatttctttcaaaacagatctacaaatttttcccaatctaagcttctcaagtatgtctataataaatgatttgttcctgtggggaagagaacagatgtggcaggttagctctgaggttcaagcatttagcagggacagtgacatcatcaagtcactgagagctcaacttcaatttgcccacagcagggctgggagacacaagatcctgccctggagctgaaatgggcaccaggctcttcttctatgtggccctttgtctgctgtgggcaggtgagggctggtcacaggagggcctccttccctggaattcccaaggactcaatgcaagcttttctgttgggatgacagcatcagtgtctgttgttctctattacaggacacagggatgctggaatcacccagagcccaagatacaagatcacagagacaggaaggcaggtgaccttgatgtgtcaccagacttggagccacagctatatgttctggtatcgacaagacctgggacatgggctgaggctgatctattactcagcagctgctgatattacagataaaggagaagtccccgatggctatgttgtctccagatccaagacagagaatttccccctcactctggagtcagctacccgctcccagacatctgtgtatttctgcgccagcagtgagtccacagtgctgcacagctgcctcctctctgcacggaaacggcagttagaaaaactgaggttgcctgtgcacccaagtctgggccccaccctgggacgtctcagcccccataggagtcacagagtcctgcccaggttgggggggtgtcttagagcaggggccatatgaccctcagtgctgtggctctattcctacccctgtctcagaccatctggagtttgccccaacacactaaccttgctgggtctttcttctgcagctctctttttctgcttgcagaatggaagagatattttgttgatattcctaattcccttcataatttcaaagccaacatattcttctctcccttatgggatcagtgacttcttcgtgtaaaccttaccgtatcctctactacccttcaactcacagacacaaatcttcccccatgtggtctctgctcctggctgcctttcttctaagggcaatagccctacaaggtcatctatcatttgcccttcacctgcttctccatcatcattttgtttttttttttttttttttttgagacggagtcttgctctgttgcccaggctggagtgcagtggcgcgatctcggctcactgcaagcccgcctcccgggttcgcgccattctcctgcctcagcctcccaagtagctgggactacaggtgcctgccacggcgcccggctaattttttgtatttttagtagagatggggtttcacggtgttagccaggatggtctcgatctcctgacctcgttattcacccgccttggcctcccaaagtgctgggattacaggcgtgagccactgcgcccagcctccatcatcattttgcattaagtttcccctggctttctgctttagccacactcccctacattcagtttacacgttcgcaggtgtagtgttgttttccaccctggggattgtttatgaataatagattatttctacttcactgagcatatgtgcctccaacttattcccaggcctccacttcattccttacataaaagtctatttcaggtacatttactcttaactgtaaaaagcaagacaaattttatgagagaaaaattaagaaatatatttttagcactcatttgaggaattagttttttagatgacacataagaaaaccactagccataaaaatatttgaggccgggcgcggtggctcatgcctgtaatcccagcactttgggaggctgaggcaggcggatcacttgaggttgggagttcaagatcagcctgaccaacatggagaaaccccgtctttactaaaaatagaaaattagctgggcatggggtgcatgcctgtaatcccacctactcaggaggctgaggcaggagaatcgcttgaacctgggaggcggaggttgctgtgagccgagatcatgccgctgcactccagcctgggcaacaagagcagaactccacctcaaaaaaaaaaaaaatttgtaactccagttgcattaaactaaacttttgtacaccaaaacatagcataagaaatgaaatgttaagccacagcacaggaaaaaaatgaggaatgcatgcagatgatgaaaaatcagtgtgacagagaagagtcaggctcacccatggctcctctatgcttcctggcctcatttgcacttggagggctgggagcatgtcaccaggttctgaatagtgggaggtgagtaaaaataatgttagcccaatttcaagtctggcccttaaaaatatcctgtaggtccatgctgagggtccctaagcgtactcccgtgtttagagatgtggtatatggcatagagttgtactcacagctaagattttctaacatgtcttagtaagttgtcagcagcagatcatatggagaaaacacaggtggaatctgaaggaatccaaactcaggcctccttatgctgtcttcctcccggggaggtcacacagggttctcgcttcactccgtagcaaaaatgcattaacacatgtgcagtgtttctaccaagtgagtccaacagagactcagcactcatgaggtttcagaggaggctggtcacaagcacatactgcctagcattaaccaaaaattcagactccagaaggaaatctggtgttcagtacaatactgtttgcaacaccagtttaggcacaacgagccgctcctctcagttaggagaaactttgccagtgcagggcatcactcatcagccaagtggccaaagatcagccaaagttcaatcttgcaagcaggcagtctcaagcctgctgtcaactcttttctgcacagacactcttcaactctcttttgccatgtgtggatgaatttgggaggtcatggcacagattataaactggaagcagcttggctccctgggtcataatttggtggacagccatggaaaaaaagctgctcatgccccactgggttttgtggtcatgagaggtaagacttgatagagttcagccactgagattttaggatttgttttatttatttttttttctgtagcataggtgtccttttctaataaacttagtacataaatgagtaaaacattcttattaataagacgacagcccaataaaaatggcaatactgaagctaaataggcaattcacacaagtgaacataagttaccactaaacatgagaataacttttcaaccttacttataatcagaatatagcaacctgaaataataagttatgattcaaaaattactagataggaaacttttcaaaggagtgacagtcctaaatctgaatagacatttgaactaatgaaaaccgtttatatatccactagaagagataatgacaaccacatcagaaaacccactgtgggatatattgtgactaatagcatttcttgagaaattatgagtgtatataaatcatttgggttccttttcttgtctttaggttcaatcgtagaaaattcaactttaagtatttatttttcctattgtaaaggtagttttttaaaacaatcttttaaaaaagtgggctgggcatggtggctcacacttgtaatcccagctactcaggaggctaaggcaggagaatcgcttgaacccagaggcacaggctgcaatgaaccaagattatgtcactgcactccagcctgggcgacagagtgagactccatttcaaaaaaaaagggtgggtggcagggggaaatatgtgtaacatataattttgtcactttatttttaaattgtacaattcagcagcattaagtacattcactatgttgggaaactgtcaccattatctgtttccaattttcttttcattgcctcaaacagaaactcaatacccactaaagaataactccacataccccctctttctgctaacctctaatctaatttctttctgaatgaatttgcctattgcagattatttatgtgaaaccatgcactatttttccttttgtgtcttgtatctttcacttagcttaatgctttcaaggtgcattcatattgtagcatttatcaaaacttcattccttttcatttctcaataatattttgttgtatgcatataccacatttgtttatccattcattaattgattaacatttgggttgtttctaccttgtagatattgggaataatggtgcaatgaatattggcctgaaaatatctgtttgatgccctgttttcaattcttttgggtatatacccaggagtgaaacttctgggtcctttggtaattctatgtttctccttttaagtaactaccaaaatggtttttttttggttgcagctgcacaattttagattcctaccagcaatgtcatttcttcacagaattgccagcatttatttcttgtttttcttttcaaaaatattatgatgatgatgattactattttgtatagccatcctagtcagtgtgaatgatatctcattgtggttgtgatttgcatttctctaatgactaaaaatgttaagtgccttttcttatgcctatgatcaatttgcacaccttctttggaggtaatgttttttgtctgattggcttttttggggtgtctcttgactttagaattatgttggtgtactgcgacaatgctaaaagaaattgagtttgaacttcatttgggaggtttgtggttggtagtgtttttagtgcggtacttcttaaacatttttaatataccatagaagagagaaaatgattacattttgatatgatttggctgtgtcccaacccaaatctcatcttgaattgtatctctcacaattcccacgtgttgtgggaggaaccctgtggggaggtgattgaattatgggggccgggtctttcctgctgtctcgtgatactaaatgagtctcttttagatctgatggttttaaaatgggattttccctgcacaagctctctcttttatgttaccatccaagtaagacatgacttgcccctccttgccttctgccatgattgtgaggcctccccagccatgtggaactgtaagtccattaagcctctttttcttctcagtctctggtatgtctttatcagcagcatgaaaatgaactaatacatatcgtgatttagggaactcctttttggattgaatttaactggcaacctctgagctttctgtacctggatattgctaactttttccagatttaaggaattttcaaccatgttttatatatgcttttgggactggaacaggatatggacatttttccaatgcatcactccacagattactactcagttacagagggtaaaagacatattaaaaatgaagagatccagtgtcagttacctcaaatatacattgacaaaactgcataaaaatgacattccacattcttgcaattgaccagatacaataggaaatacacatcatctgtggtgtatatttgccaagtaactaacctctaatagtatagaaattcttgttgtggctcattttacaactaagctgacctaggcacttcaaaaacttataatcatgaaaaacaggaaatataataagtgggtggaagagatgtataatttaaaagtaactaaggagaactgctaacctcatgaaatacgtgatctttgattttgttctagaggaaaagtgaatcaaaaccaagggacatgctgagacaactggagaaatttgaatgtgaagtatgtactagatgacaatgctatgtgaatgctaatgttttgagcgtaatagtgacatttgtggttatataagataatgccaattttttaggagactcattttattattaaggataaaatgcttcagaaattgagggcaaaatatatatagagagatcaagcaaaatcacaaaatgtacaatcggcacacagatatacattttaatattctgattgtttcattattctctcaccttttccatagatgttcagtttaaaaaaattgaagaaaaatattaacagaccaaaataaaatgttggtgttatttcagagtaataatgttgttgggtatttcttatattcatttttaatatatttgaaatactatgtcattaccataaaataaatatatcaaataaggtatcttttagtctagagtatacttttttaaataggagacaggctatgatttttaagaaagtcccaaaagaaaacaagagaatttgcagtctgaggacaaagcagcttggtatctctgagaccagtgcaaaacttagctagtaatgcatgtcaagaggccttttagcaaatatacaggactgttttctctgtatcaagagattctgagtattctacagtttggctgaaaactcaagaactttcaaaggtgactgaatgtaaagagaagagtagtgattttccaaagttagggctggacaatatgtatttgttcaacaaagagggaggctgtctcagtttatcctctgctgctatagcagaatacctgaggctgggaaaatgtataaagaaatttataaggaaaagggctttatttggcttgcaattctggaggctggaaagaccagtagggcatcaacatctactgaacttcttttgagggctttgtgctgtgtcacaacgtggaagagaagtgggagaaatgagcaggcctgtgcaaggagagccaggatgagcaagaccctcactttataacagcctgcttttatggtaactaatccagatgctggagagagagaactgactcctggcattaatctttgatgagggatctactcccatgacccaaacaattcccataaggctcacactaccccagaaaaatgtgagcaatgtgcctgtagcaacaccactacattgacgaataagcttcaacatgaattttggtgggaacacaccataactaaactataggacaggctctagcaagacagtaagaacaggtggaactaggaaaaaattttccctggtttctcacaaacactgtcctatattagccctgattctattgaagatagtatagaagtcccaccagtatctctaagccatggaccgaggacctaagtccagtgacactggccatcagaaggcactggggtttgatgatgctcaaatgtttttgaaacagggctcagtgctgcctgagatgttaagtttaaaggaaaagtgtgtatcctagtatccagtatcttgtttgcagaagttgtgagtagtcagtgaaatgtgaaatattaaaaaaaaaaaccctttatctttcattggtgctggcatgttctgctcagcagtaaaatctgaactgtagcaaatcttttgagtggagactcttctgggcttgcatgggaggtagatggaggaggaccaggagccagcctaaatgctcagagacccatgcaaagggaaaatgactggctcctcaggagaattcagagaaatgtgagcaatgcacctgtacctcacaccttacctattctagtcgtgctctggacaatgtatacgatgatgtaagggaaatataggagagtggacaattctagtttatgccagataggctattccaaattgcaggtagtaactacagatattcttaacaaaaaccggatttcccagggctctggccttttcttccctgagcagcacaatgaccagttcctgccttgacaagaattctgtcatagatttctcagttgcgctgcccaggaagcagatgaggcctgggaacaatgaggaatgtcttccctggacttgacatgcctcacttgcaagcacaccacatgcaggtcctgtggactgataggcttgatagacagataagtcctgtttccagctaccagcctccatcccctgaatgctgttgtcacccagaactgtaaacctggtcacaaagatggagcaggtagtggccccttaatgtgaagaaattttccatcatgcaattattacctggtgcctacatgagttggactcaaaccagcagatttttacctcagtagtaaaggatttatgacagaaacggatggctctggtaattctatacccacaggtattcacctgataaccttgacatgtgtcccctaggttttgcaggtttggtggaatatctctgagtgcacctcactgaacacatatatcctcattcccacctccctggacgtgcatctccttgtgttattgtcttatgccaactctgaggagcgccatcccctaactccttttatttcttattactcaggcaaggaataaaagtgcgtttgtgactaatgttgccccattagaaacaaaaaatagataatgaccactactgttcaactgtaatttacactagaggtatagctataaggttatttttagatttcagcaagtctctttgattttgcatttcttacaatatatactgatattttcagggataagagaattccccacctatcttcgataaaaatgagaacttactttcattgcactggtgacccaaaactacaggcagagccatgatgaaggcttggtacacaatgtatcatgaatgataacagtaaagaggaaactgttcattggccttcactaaaaatgaacccttccaactctgtgcccaggttattgttttatccctttagcttacagcgcgtcagctaattcaacaagcttctaggataaacttgtgtcaattaccccagcttctaagtgcataggaccaggaagatagagaacctagtaaaagagaaacacccaaagagaaggataattgctgataagacaaagaggtcactaactgatatctctgtttcgagttgccttcaactcgaaacatccagcagaggatgggcctagagatggagtaggagatccagtccccaagccctagagatgtgagtgaggacacttggctgaacttacacagtctgtgaatacagtaaagcaacttcgtgctctcttttagcttataataattggtttctaacaatgtaggcatttgtggaggcaatgatgtcactgtgggaactgccatgagaggacagggacgtccctcctcctctgcttttgctcacagtgaccctgattgggcaaagctcccatccttccctgaccctgccatgggcaccaggctcctctgctgggcggccctctgtctcctgggagcaggtgagtcctaggaacaccatgatcacattggatctctctgattatttcaatcatttccttctattttcaaattctgtctttttccttctcagaactcacagaagctggagttgcccagtctcccagatataagattatagagaaaaggcagagtgtggctttttggtgcaatcctatatctggccatgctaccctttactggtaccagcagatcctgggacagggcccaaagcttctgattcagtttcagaataacggtgtagtggatgattcacagttgcctaaggatcgattttctgcagagaggctcaaaggagtagactccactctcaagatccagcctgcaaagcttgaggactcggccgtgtatctctgtgccagcagcttagacacagtgtagcagagacacttccctcctgtgcagaaaaccagaaaaccgcaggactctctcctctctactcagctcacagcagcctttccttattcctcatcctcccaaggaagaagtgagttttcagatatagctaggactcatatagtgggaggaaataaactttttcttttcttttctttttttctttttgtttttgagatggagtcttgctccattgcccaggctggagtgcagtggtgcgatctgggctcactgcagtctctgcctcctgagttcaagtgattgtcctgcctcagcctccccagtagctgggatgacaggcatgtgccaccatgcccagctaatttctgtatttttagtagagacgggattttgatatgttggccaggctgatttcgaactcctgacctcaagtgattcgcccttctcggcatctcaaagcgctggaattacaagcttgagccactgtgcctggctggagataaactatttcttaaaacatgaaggctgcagttgttatttgaaaatatgtctaaggaatctgaaacacctatcggtgagaattcaagaaaccaaaactgaaagtgacttatcacagacttagtcttctggggtactaatagttgttcttgtatttaaaaaatgcatacaatattttatatcaattaaaaaatacgtaaatttgaaaaataaaaacatgcagtcaataaacatgtgtgataaactttaataatacagataatgattgtatgtgagtaacaatcagcaggttttctctctgcagttgtcagcatatgaataatttgaatcctatccttggtgacaccctggctctggagcctcctctagacctctcattggatgtattatgcaaccaaatctcaacaggtactatgtgtttggaaatctttttcccctgtttttgcagaaatatgctaataagagtaatgttaaagatgatgatgttgataatttcaactatttcattcggcaccctttaaatttcaaaaaaatgcacacaaatggatatcctggcaacgagtccaaaatcttagctcaaaatgaattctgctactccagagctttctaactcttccatgtaacaaacatatcccaacattatatggggctgggccagctagttcagagactgatgaggacactttcacttgtctgtcctcatatattaaaatagctccttagttgatatggtttgactgtgtccccacccaaatctcaacttgaattgtacctcccagaattcccacgtgttgtgggagggacccgggggatataattgaaccatgggggccagtctttcccatgctattctcatgatagtgaacaagtctcacgagatctcatgggcttatcaggggtttccacatttgcttcttcctcattttctcttgccgccaccatgtaagatgtgccttttgcttcctgccatgattctgaggcctccccagccatgtggaactgtaagtccaactaaacgtctttttcttccctgtcttgggtatgtctttatcagcagcatgaaaacagactaatacatcagtgcattagatattcctgaaagaacttcagaagcaattaactgcccctggtccagttgcctcctctgataatgcattgtgtgtgtccaactctagtctctaccctatcttctgcccagactgtcttgtactagaaattattctgaagtattggttagaatgtttggaaatgcagcttcctgggaatcttctgaaggactgtcactgtccctcagcccctcctgacttccctttccatccacctgactgcaggtcctaactgatggccatgaactcactacacatctcccttccttccctgcaatttactcagctaacaacacctcagccaggtggtgggtgaccatgaccatcctcctcttccttgccagaattttcatttggttctttttctgatctataaggtcatcttttacagtcagtcattccctcataaccttttttgagtgtatcttttatttcgttgagcataggacactcagttatttcagtctgtctgcttattttcacctctgtggtctttgtggacatttttgtatgtgtgctgcttctcagtcatttgtttgtatttttccttttaaacctgattatttttgacatcatgccagacactatggctgtagaaataatttctggtctaggatggatatatctttctccagagataattttattgtgctttgtaaagtgcatggatgcataaacaatccaggactccctggaacagaattaaaggcttgaggtgtcctggagaccctggaggacaggcttccttctagtgcattgattctattcaagtccctcaatggtcacattaagtaagttatggtctttgcctttacccctctggactgtgagtcagcttccttagtgctgggctgggatcagcaaatgcccataagggcagtgactgctgtgctcactcccgaggcccctgccttctccaagattctggcccagttattcctcatcgtatctttaggatatgaattagttgcagtttgttagtgtggttattttactcaagtacataaataataacaaaagcattaatctgagttccctcttctgtaattatacagattaaggtcaaaacattttatctgaagttttaattttctttgaattttaacgtcagattcttagtctgatttgtttgatatttgacttaaacagcgtagagatgttatacagaaactttaattttaaggaaagaactttttaaaaacttgaagtggatttataatcaaattgggacccttacttggttttgaggttttatcatttgagtatttttatgttatttattacataatctttgatgcttcactggatcataagacaagatgagaacagagagtgaatatttagacttgatcagagagcacaaagtgaacatggaattagtttctgttgatgaacagtccaactatgtaaaatatttaaagacatttattctgagccaaatatgagtgaccatggcctgtgaaacagccttctggaggtactgagatcagtgcccaaggtggtcagggtgcagcttggttttctacattttagggagacatgagacttgagacttcaatcaaacacaattaagagatacattgtttttggccagaaaggcagacacctggaggcaggagtggggagaggttccagcttaaaggtagatataaaatttttctggttgacaattggttgtctctcaggttaaattttaaaagagccctggctgggtaggaagtccattcagattattgggggccttttaattttatttgtggtttacacttcatttctgcattgttgtgatccatttgtgccatgttttttgagtacacctgagggccaggggtcagaactagagggagtcacagatgtgtgactatcatcttttcctacttaagcccaggcttctgggaaaacactttgctccacattttccatttgagggaacttgcctaaagcaatgctccagttttattctttctattgcttgccaaatcttccctatgggaagggaaataagttattttatttagtctcctcttcatctgaggttcctctctcttcattctctccctttcatcctggctactgggaataaaagcagattcttttggtgcttttttaaatgcactaagatcagtgggaaactttcttttccttatagggatggcctgtaatttggaggggagagagaatggattaaattctgattcaagacagtgttggtcggtctttttgccctcccatctgagccgggttgtttatggatattaaaactgatattatgtctccatctgtcagactgtaatgtccatctctcaggtggttccatcttaggtcataatgttgttttatgaccctccaacaccacaaattatggtatctcgtttccccatggctcaataaagggaagtgcaagtccttggtcttgacaaagagcacatttgtgctgttcctgcctactggccaccaggaggcactgtggcttcactgtcatccaaagtctatgggggaggggctgggattgctccctggaggatccttaatgaaaaccctggagttggacctagagtcagggagctgggttggaggtacctgcaatgaaggctgaaaataaagggattagagaccaacccttttgcctcttgatgcggagatgggttttgctgtaaattgagatttgaatagggctctgagtggcagatgggcttgcaagtggatgtaggtctgagctcactgaagacgtggaggcacaaggagctggggtggtgcggcgccgtgttctgggctggggaaagcagaaaagcagtgtttgtgtcacaggagccttgtagagcctggccccaagccggccgaggctagccctacctgttccgtcgaacgtagagggaagaacaggtagaaatggaggcgctaccctggaccatgtcagggggagcctgtcctcaggcagcttcaatcacaatgatgtaccagcagcatatacacttattagcaaggcttagggtggagtaggacagaattttctcccccaagaacctttgctcagggcgggaaaatgctgcagtctagttctaactctattactccagatgcctctgtgtccctggaagaaggtggggtctgggcatataaaagttttgtttgttttgcctgggttgatttcgtttttccatgtgatcgtgcatctgactctaccagtattttgtatccggcttctgcctctctctctcatgagtcccatggctactataaggtattcaatttctattgctgctgtaacgaattaccactaacttggtggcttacaaccacacaagtattaccttacagttctggaggtcagaagtccaaaatggatgttactgggctaaaatccaagcgttggcagggctgcattccttcctgaggctctagggaagaactgtttttctctccttttcagcttctagaggccaccagtgctccttggctcatggccccattcaatcttcaaagccagcaaggactggctgagactttgctcactctgcatactctgatgctcacttttcatcctccctcttccacattttaggaccattgtgattacattgggcccctatattaaggtcagctgattggcaagctcacttcacttggaacattaattcccctttatcaggtaatttaacacattccagggattaggcctgggcatggttgaaggggcattgttctgactaccaaacctaggcacctggtaatagggaggaaaacgtgttggtcaccttaaaaactgattgatgactaccgttttacattctggatctaacacacacaacaaagggatggaacccacaaggaaacagacacctcaggtcacacaagctcatctgtaaactatttgctccttaggatgggcaagtcccctggggcgcaggggactcagctgtatgcctctgtgccaacagcgaaaatgtggccttaaactgctccttcttctttgttagcaaataacctagttgaccaattcatagagcagaggttctctcagttctctatactctacaccccgagaggaagtcagttagtgagatgtaagattcttttataagaaaaagaccaggtgtaaagattaagaaatgctgagctttgctagaggtaagaataagatgtaaatcaactctggaacatttaatttccaaatctttgtgagaaagacaatcttgtttctgatttattgtgtggatagagaatgtgagagattctgtgctctgggctttgcaaactcaatagagttcaaggatcaataaactcggagagacccttcactgcaaagaagagctttgaaatctaatgagctttcgggacactgattcagctcctgtatctttaacaacgcggttgacatgcttgctcttcctgggtaactcagatgctaacttctaactcatttaaaggcatttgaagaactaggagcacagagtcaccagtgagaggaagaggagagtttgcagagaagctggcttgcaataaggcaatgagttcatctttaaatacttggagtttgaggtgcagatggatatagttggcaggctcctaggtaaggcatgttatggagaaggtgctatgaattgataatatcaaagcaaatctacagggatcctctgcaagtgtgcatctgtatctcagatcaattatagttgacttcagtcctgcctgattcatctcccaaaaatgtagtctgcctgattcatctcccaaaaatgtagcctccgcttaaaggagctttcaagttgggggtggtgggccattcagtgttgtcactaacagatgcatcttgtgggggtaaaatgtcccaaagtatcttttcttgcttatgttcataagggcgctggtctggaatgtgccacatctgttctcactctgccatggactcctggaccctctgtgtgtccctttgtatcctggtagcgagtgagtcctcatgtatttatcatcctcatgctgggcctctgtatagatgacttcctgtattttccttattctgtttcctaattttgcgttcttttatagcatgcacagatgctggcattatccagtcacccaagcatgaggtgacagaaatgggacaaacagtgactctgagatgtgagccaatttttggccacaatttccttttctggtacagagataccttcgtgcagggactggaattgctgagttacttccggagctgatctattatagataatgcaggtatgcccacagagcgattctcagctgagaggcctgatggatcattctctactctgaagatccagcctgcagagcagggggactcggccgtgtatgtctgtgcaagtcgcttagccacagcgctgcagaatctccccctccctgtgcagaaactctggtgcttcctcttttcctcacagctcccagcagtcctgagcaaagtctttcctgcctcaccctccccacaagaataattaagtgggtttggggcatggcaaagacataagatgatacaatatcaacatacaaaatcttgtgtaggagataatgtcgaaaatgcattttgcaaatttctcacaaattgtgtatggggtcataactcacacacaggtaggataaaccttaattacccacaccgtaggtttccctgccttcctgtatttgacactcccatccaaacagtgggagctcttcagaatggctatgtcttgtgaactactctgcccacttcattcccttctcactctaagccatgaacagaaatttcccctacaagtactctttattgtaaatgaaagttcttttctatgattgtggacattcctttataatgctaatttcaatttaccatttatatacggatttttacattaaacttaaagagatcttcagtgtggataatacaggcagtttaatacattagaagtaagctacccctcttggcctacagggatccatttgtttctatcttgcataaagcaagccaggtgctagctaaaggtctgtgtgcactcacaggacactgatgagatctcctccactgcctgttctggaactatcaatatgaatatacacagggtgtctaaaagcacacagggcctggtgtggtggctcatgcctgtaatctcagcactttgggaggctgaggcgggaggaatgcttgaggtggggagttcaagactaggctgggaaacagtgagattttgtctctaaaatatatatatattttaaaaattagcctggtatggcagtcttagctactcaggaggctgagttgagagggttgcttgagccctgaagttcgaggctggagtgagccatgatcatcgcaacagagtaagaccccaaatcacacacaaaaaataaataaataaagttaaaaaacatacacaggcctggccagtcttacttggccctctttcctccctgatgctgtgtcctgaacagccaaatctgtattttttttcttctggtttatgatacacatttctacacagcacttgcaatttattatgaagagttataatgtctttcttctatagtagtatttacatactgatgatttctcaacccctatcagtgtatcatcggcaattgttgcaaaatgtgcctgtattttgcatgcccaagacaatttgggtttacccgagttcttcgatagaggccctggtttcgcttgtcactgtcctatttttgttattcaaagactgagactttcaagatcagaatgatgcagaatgaaattcggggtatcctttaatgtacatcgagagacctactctgtgtttatatattgttttggtgtcttccttgctctttgggcttctctctgttgcctccagatcattttccttcctcctttgaagcccagctcctttacacacatgacattagaacagcacccttctttgctgcacttgcttctttcccttcagaactctcttctcattcagtccttctgtctgctactaatcttgtcatcattcctaatggctactcatcacacagaccatttttcattggttttgcttctcactttcttgacttcctcacttttgacattttatccattaatcctaacattgtatatctgacaaggaagatattaaaaatcacatgttttgaatcagtgaatcaataaacaggtttaaagagacaaatgcaaaacaaaattgtccagagctgctgttctgggctggactacagatagatcatgtaagaaataataaaatcatctggtaatttcaatttatctttagaatctttggacagaacagctccaggggagtcaagggatcatagatggtaagagagacaaagaggttaggaggtgagaactggctagggtggcagtccctaacctaaggttttcaaggataatatcaaggtcctcaatttcttttaaatattttttgaaagtgaaaggaaattatgcacatgacccaagctatacataataaggaaattgactcatgtctttgctgagatggaattatattaaagttctgtgaaattaacttatgggctcatctcatgctgattaaaaaccctgattgacagcgctgtgtgttacaaaaatgacaaaataaatgattactttaaaaacattattttaaaaaattagcatttgccaagagtgggggtaaaaaatgacatactgccagatggtacaaggaatggagacgtttgaggcttccagagcctctgacctagctcaccccactttcccgggcccgatgtcttctaaagttcatctgtgcagggaaagggaagtgtagttgtgcaggaaatacggcaggttaggaaatcacaggctctagagcttttacaggcttttacatcctgtgtatctgtgctatttccacagtctgcaacaaactgtattctccccaaacagggccagacactcctcatctatcaaggactgactcacatctaccttcctctttgcttcttaccctgacattccctggccactgcagtatatcattctgtttcctttacattcagaggaaaattcaggtatataattgatactactcgatgtttgtgaaatgaataaattaatgtccatttatacagagctctgaaatattatctattactgttttcccttcaaaaggggctccttttacttgaaatatgatggagagtcattatggctagtctcaattttccatacaatttctgcagtattccaagcaaatgtgttttcccagtcaggattaatgaccagtactacccagtaccctaactatatctaaagctggaattcacaaatgtccttttggaacaaagaaatttatgttataataatatttatccagtcctatgatccagtaaaagaaattcctcaccacaaccacacttttccaaaatcacatctttatgagtctggacacattatcaggggtgcatttcagaagtcaacctaaaacactgagagaaaaatttgttgtgctcagtaatagaatcttatccttgcaataagaagataccatgtgtgtatgtgtgtgtgtgtgagtgtatatgtgtgtatgagtgtgtgtgtgagagtgtatgtgtgagtgtgtatgagtgtgtgtgtatgtgcattttctcatgcagattcatccacatgaaaaagtttatctttggatcgcattacaaagaggcactgggtcacctggggagctcataggcacttctggctagtgatgggaaatgtcacaccactcaatctgcctaagttatagccaatagggttgtttatttcaagactttttataaattcagaattaaatatgtaaaaactagaagccccttttattaaatgcactatttaaaatttggtaataatgactctaaatacaaaatatgaagacacatgagatattaaatatttttccaagatcattctgctggatagcttcacactgtttaattgtatgtcctgtcttattcaggctcctctcttccaccttatcatatgaattgcaatgacataacaacgattaattttgcaatcaaaatgttggttaatacactcttttgtctccactggctaagggaggatttagagattaaccctaaattggcttatctgggaaagcttagagagggtgtatgtgagagggtgggggctgcaggagcgggatgcaggggtctctgttacggatttggacaatctagagctcatcagatcagaaggtgtgaatctgtgagactatggatctatagccacttggaggcgctgtgtctccgcaatgctgctgggaaccctggggaggggagggcaggtgacccagaagaggaaggctgaagagaatgcctggctgcctgctagcatcaggtgggggccatttgagttcagagtgagttctgagtttaacacagactcctcactgtccagagaagggtaggggtgcgaaaggcctcagtttgtaccaacaagagagtgtctctgtgtctgtctggccagtggatggtgaaggggctggggcatccagggcttgggaatcagtgtcagggcagggacagcggtgggtggagtaaggtgtgacatggacatgtggacactgtgctccacctttagtttcgggacccttcagggcaggaatgatacatggggtagcagagccaggcacccacctaagggtacagtgggcaaaggatggcctgcagaggaagtaaatagaaaggcaagtttcctatggtaatgccaaaacattcctgcccccactcagaaaaagaccatgaatgggatgttggcagccagaggggctcaggatctggtgatccgacaggcctttcccaggtaccctctgttgcttctttatgagacctgttttgattctaacagaaatcatgcaaaataagtattatttaactgtgtatacacttgactgaaataactttcctgggtcttgtacactcttagatggaagaaaccagacctggcgttggatagatcagtaatagggtgactgtagttaacatcaaccaattatgcatttcaaaatagctagaagagaataattcaaatgttcttaaggtaaagaaaagacaaatattaaagtgatgcctatcccaatgaccatgatttgattatattaatgtatcaaagatcacatctactaaaaaatatgtacatctaatatgtatcaataaatagttaattgaaaagaagataactagctgacgtctgttcctccagcacctctacctgctgtccccactctgcagatttgtcctctcacatggccttccctttccaggtccccattagcaggaggagaaagtcaggcattatatgtgatcactatactctctttgctgaaaagtccaaggaacatataacttccaggctaaacatattcattcatccttcattgtgacaaaaaagagaggtgcaattttctgcaccatagctgtcctatgaatgaggccaggtgatctctttcatgaaggatatgtgaggagagagatttctcagtgcacagcaaagggaatgggatgtttttaaaggaaagtgtagttttcctgtacctgatgtaatttattatgagggaaaagacacaaatcattattattcattagttaatttattgatttcataaacattttaagccccctgctttgtacaagggattgtgccacataaatttaaaagcgaaacaaaaaataaaatttagaaaaacagataagacaatttttaaaaacagtatgtttctcgcctttgacaatattaaggcaattaatatggaaatgtatttattgaattattttgaaatttatattttgctaattcaaaatactttaatgtttctgaattatacaaatgtcctttttaaaaatctttctctttagttacctacctccttttaccacctttttaaaaaaaattttagtgagaacatttaatatgagatctatcctcttaacaggcttttaagtatatagtagagtatcgtagtccacagacacaaggctgtacagtagatctctagaacttcctcatcctgcttaactgggaattttatacctgttgacagcaactccccattgccaccaatccctagcccttggaaaccaatgtttcagtttttacttccatgagtttgactatttaggttgcctcataaaagtagaaaaaggcacggtggctcacgcctgtaatcccagtactttgggaggccgaggtgggcacatcacgtgaggtcaggagttggagaccagcctggccaacatggtgaaaccctgcatctactaaaaatacaaaaattagctgggcacggtggcaggcgcctgtaatcccagctactcaggaggctgaggcaggaaaatcatttgaaaacgggaggtggaggttgcagcgagccgatattgtgccattgcactccagcctggtcaacaaggcgaaactccatctcaaaaaaaaaaaaaaaaaaaaaaaaagagtcgtgcagtatttgtctttctgtgtctggcttactcagttaccataatgtcctccaggtttatccacattgccacatatggtgagattttcttcttttttgatattatttccttgtgtgtatataacacatttaaggtctgtggtaataaatgcatagtatttgactgtttctataaaaccacacatcacacgagtaacagggtcatttgcagaggtgcaggctctgagtacattaatgcacctttatggttcaattatgctgcacggagaagattcagaaaaaaaaatcataattccatcctttattgtcattttactatacacaaaatagaagcccttcatttgcaaaattgcagttaattagaaattcaactgtcagaaaaagccttaagacacaaatgctattctcattttacagagaggagggaattgacccacaggttaaataacatgatcacattaaatggctattaggatgcagtaccgggggtccagctctgacctgtcagtctctaagccctgtgtttatagctctgtgctataaggcattttcatgaagagagacgcctacctttcaaaatcagagtatttgctctctacatccctttcagacctgctggctccaataacatcacagacagagatgaatgtatcctggagacagtatggggaaagaactctgaaaagatgccatggcacccagccctgactcccactctaacaccaccacatcactaactgagaccagctcttgacaggttaactttagtttggtttttgttttgttaatctataaaatgagactaatacagtctatctatagggctgtatatagaatttagtatcataaaatatctagcctataataggaatctaaatctcttgattccctttgttaatctcagacagcctcttccaccctcaccatgcacaaaggcagattcagacacactctgcctagaaatcttaagctgagaacttagaagtcacagaagtggaaatatatatacctgatgatccctcacatgaaattaactaaagaatgtagcatacatacctcctcagatagttaaaaatcaacttcattaatatatagattatataaacattacacattttaagtgaactgatgagtgattttggagcaatatatgtgtatagacccttcaatccccatccctattaagatgccgaacatttccatcacacagagagtgttctcattcctctctgcaatgcctccctccatccctgacaaccagtgatatttatcactagaaaattgttttgctcaggtacatttttaatggaaatttacaacctctaactattaaaacacttcctctttagtacacaggtaaatattcaagagagggaggtgctcccaaagatatttatggctattcccctcaatgacagaatggataaagaaaatgtgacacatatacaccatggaatactatgcagtcatatgaaagaatgagatcatgtcctttgcagggacatggatgaagctggaagccattatcctcagcaaactaatacaggaacagaaaaccaaacaccgcatgttttcacctagtgggagttgaacgaagagaacacatggacacagggaggggaacaacacacactggagcctgtcggagggcggagggtgagaggagggagagcattacgatgaatacctaatgcatgcggagcttaaagcctagatgacgggttgatgggtgcagcaaaccaccgtggcacatgtttacctatgtaacaaacctgcacattcttcacatgtatcccgaaacttaaagtaaaatttaaaaaatttaaaaaaagagagattttttatggctttagaagggtttcaaacccttccagaaccctgagagacacctgatccacgttagggataatcctgtctggagatagacaagatgatgaaatgacaccaaaaatcttcccacatggaagaggctatttccacataatttgttcattcattttcattattttttctcatacactcattcacttaaattattttataatgatattctgacaaaaactaatcatctccaagaacattattttgagtttccatcagacaatatttagctgtgattcagctctgcttcctgagcacatagagtgcactggggccaagtgaaccatgtgcaatagtgactaccttgagagataatgtcacattgagagaaggggtctctcttccttgaccgcaagtgtccaacccataaaacatgagccttgagctagaaaattcccctttctgttctggcgctgcctgggcaccaggctcttttgctgtgtgtccctctgttttctggaccagagaaatactgggcacatatgtggcatctactcattggtttgttggaccctagcttgcagataatagtaccaggtgttcctttgctgtgactttaacttctgtgttcttcacaggacacagtcccattgatgggatccaaagtaccattgatactgagtgacccagaccctggtcatgtacttgtgctaaaaaggaaaacagcacatggggaggtgagcagaatatgaaacacaattatggactcagaaacagccatacaacttattagcatcccgttgtttcaaaaaatcataagaatttgaagaacatgacaatgttatactgactgtggcgtcctaataagtgtgggactctgtgcaccaagatatgttatttgaattcctttttattgattactaaattaatggcaggaatcccacacaaagggatactccctatgaaacatgacaactcaaattaaaaaagagcactcttccttactctaaagtctgccctctctccccgagtccctcacgcataaggccacatttgtgcccctaggtcatgggcagcgctggttggccaccatcgtccacatgtagaaggcagtcagcaacgtgaagtggttctgcctactgcagtctcaccccagacatggaaagcaagagccctgggtggagctgaaggtgctcagctgggtttgtcagaagtctcatctgtcagtgagttgacaagaaacagagcaaaacgactcctccaatgttgacgagcctgcccctgggatttggaaacttcataacagaaaaaaccaatatagacaaaggattttaaacaggattaaggtcaattaagcaaattagaaaaggacacttgaaggagtatttgggacaggggaatcaaaagcaccaggaagacatgaggagtttccctaagactctagactacagcactagcactatgtagataactaacactaaaatattaattatatcattgaaaaaataaaatttacagtgaattacaaactgtttccaaaaggtcatgaaaatcttgtagacttgtttcaattcagacagatgtgttcttctcattctcagctgttcactggtgcatttattttggatttgaccatctggggaatgggtgtggcctctcctggcctctccctccctggggcccaggcagggagaatgtctcagaatgacttccttgagagtcctgctcccctttcatcaatgcacagatacagaagacccctccgtcatgcagcatctgccatgagcatcggcctcctgtgctgtgcagccttgtctctcctgtgggcaggtgggtcctgggcagagccccttgtgtgaatttcaaggcccagcgccttcccattggggctgcagcatcagctttgttctccttctctgcaggtccagtgaatgctggtgtcactcagaccccaaaattccaggtcctgaagacaggacagagcatgacactgcagtgtgcccaggatatgaaccatgaatacatgtcctggtatcgacaagacccaggcatggggctgaggctgattcattactcagttggtgctggtatcactgaccaaggagaagtccccaatggctacaatgtctccagatcaaccacagaggatttcccgctcaggctgctgtcggctgctccctcccagacatctgtgtacttctgtgccagcagttactccacagcgctacaaggccgtctcctctctgcacataaaggcagggaggttctgccctcctcccccacccaagactcagggatgccctgggcagagatctctgcgccaggaaccttggaacccacagtggccccaagtggcctggacagtatgagccttgctctgtgccaggtgcctctgcaggcatctcagccaggcctggactggtcccaggtcctcagatgtctcctttgttgctttctctggtctatccttggagctttccttttggggtggggccagggctttcccagctcctacttttctactcattatcctgagtccgaggcccccaggataaaacaggatttgcatttcagatccatctagactcccgtctctccctggtgaccctgttgcttcctctctctaatgtttcccccagcccccaccctcatgttttctctcctgtggcccacctttcccatctgggcagtcaccctccaaggcgttgctgggtctctcctccccccacctcctcgcccctctctactgcagccatgaggggagcccctgttctgtgcctccttccttcccatcacagagacttcaaaggccatttcctctgcccttgcatggagccttcctttctgcagtagccagctcctacctgtccttcatatctcagcatgatcaacccctcttgtgggaagcgctccctcccctcccatctgaaatcaactttcctctcataagctgtcacagattcatgtgtctgttagtaacctttagcacagcttggctttctcagatacttgtctggttatttttgtactccacccaatttttaagcccatgagagctaaggctgtgcctgctgcatttaccaacattggtgtctggcatgtagggagacccatttcacaaagaatggatgagtgaatgacaggctgagtgagtgatgagtgggtggataaaccaataataaaaacacactacatctactgtaacctggcagagatctagcattaagtacaagaaagcccatccctttgattgctgggctcaggtcggtcttggaaattgatggggaatcactatcatggcggccacacctggctcaaagcttcctcttgtggttgcagagcctgacctcctccaggtctctgtgctctccttcagggtctttccccacaacaaagcgagacagatcagagatccacttctagaattccatccttaaaggttgttccttgaaaccacttctggtaagaaaatctccattaagtttgcaacaaaacagggccgctacaagtttgagagtgtaacaaatttacgatcagaattagactttatgcatatgtgggaggagctgagaaagagaaggtctggaggagagaagtcagaaggcgagggagccagtcaatagccagggctcctgggggtctcggcaggacaggctggattggcagggacatgaaaggatcagagtatgccaggacatgcagtgggaccttgaaccgggggcacaggaaaaggccaaggaaacctgcttctggggaagctgttcccactctacgggggccacccctgcaggtgcactgccaaaacagcagcctggctgctgtttgccagcatttgggaagatgaactagacacagagtgcagaaggaacaagacttcctaggtctgttggatgcctctgtatctgctggtcacagactctcactgtctgaccacaatgacctgccaagtctaatagtgactgcttttcatctgtcttccaaattttaccaaatgtatccttgaccatctctaacccagaatgataagagaaatggcattctgggaaaggcaggctcttgcctttgcaaagctgacttaactcaattcagcccatgatggattcttccagattaaggcatcagatcacacaactgcctcaacctgccatggtccctggactcttctccatggacatctgtgttgcccaggtgaatgtggacacaatttgtatgtggatgttccagacactggctactaacttttcttttaatcctgtacctgaaatctccctccacccagagggtctataaatgtatgagatttattttttaaaaaatagaaatttgaattctattctgaatctttccttgggactggccagagagcatttttgacctactaacctatattgtgggtgtatttggccccccagagtgcagcagacacttcttgggcccatacatttgcgagttagactggagatgcctgtaaacatgacagattcttggtgttgttccctctcagtcccggcctctctggaatgtcgcagactaccatcaaacaaatagatccccagtatgaagtacataaggacacattaggagttagcaatgaggaaatgtgagcacaagcaacaaacgtttgaagtgcaaacccgaagactcaaaattttggcattataagatatgaaagtttggagagctacatttaaatgaacatgagagggaaaaagagaaacaaggaaaaagagaatgtctgaaaccatcaagtaactttcataaaaattgtcaaataatatatctagaaattcctcatacaaccactgaaaacaaaatggaaagtcaaacagttgattagctgctcctatgtcaaagatggatctgcaggagtgatctagaatgcagcacggaaaattaaaagtggaatatgaaaaagttaaagaacagggaagaaaagaaatggatgtttcccatatattagaatatgcaaatttttcataaattaccatttttttttgcatatgattgcagtttcaaatagataaaataggtagaatgttatgaggtgatatttatgagatgttagctgacaattatttagaggtgtttaaggacctaaattcagagtttccagaatcaaaatgaatctcaagtaagacaaatagtcaagtcatagggaaattgtataacatgagggacaaagagaagattttgaaagcagtcagaaagaaaagacagatacctcccataggaatagatggagaacaacagtaagtcaagatagtggttaaaaataaccattagctcaatcgtcattctccttcattagaggtgagattgattaaaaaaaaaacttttatacgtggaatatgaaaaaccaccactgtgagtttgctaccaagttatcttttctgaattacagttaacaaaggtgggaaatgatcccaaagaaaggcatgagggcagttcatgagggaacgcatgtgaggggacagtcctgttgggcacgtgtgactgggggaatggaggaggctggggcatgaatggggatggcagaggggaccctgacttgcaggaaagacaatgagctcacccttttgtgttctatgttaggggcactgttggtgcatcctacaggacatgcctagcagacagaagagcagctgtgggctggcaagatgaactcagagatgcagcgtgaggcctccgggtccagacagatctggagcccaaagcaatgagccatgcattgatgttgttaaaaaggagcttataaatatttaaagcagcacccaaatgtgttctaatagaaatgctggggccctgaggtcctggggattgacagaggaagtgatgtcactgtgggaaccgccctgtggagacaaggacgtcactcatcctctgctcctgctcatagtgacactgacctggtaaaacccccgtcctggcctgaccctgccatgggcaccaggctcctctgctgggtggtcctgggtttcctagggacaggtgagtccttagaacacaaagtagtttcagtttttttctgtgtgtaggcttgtgtgtgtgtgtgcgatgactacaaatattttccttattctgttgccaaattctatttccacagatcacacaggtgctggagtctcccagtccccaaggtacaaagtcgcaaagaggggacgggatgtagctctcaggtgtgattcaatttcgggtcatgtaaccctttattggtaccgacagaccctggggcagggctcagaggttctgacttactcccagagtgatgctcaacgagacaaatcagggcggcccagtggtcggttctctgcagagaggcctgagagatccgtctccactctgaagatccagcgcacagagcagggggactcagctgtgtatctctgtgccagcagcttagccacagcgtggcacagtcgcctcctttctgctcacaaacctcatccttctctctccttgcagctcctacaaacccttaacagaggcctctctttgctccttacttttcatgggaaaaaggtagatttggacctcagctgtcctttgggtagaaagagaccgcagattcattcctgaaacacagtgagtgcaaatgtaggtggtgaaaacaatcagagcccactgcgctctgggagtcctccgagccagctcactgttccaagcaaggagtcagtgtcttagccttggccttcagggcagacatgcatcttctataggtcttggaggctgctgtgctgcccacatccatgaggttgtcataggcaggaaacacgcctcttcttcatatgttggggcatttggaaggtctgaggctacatccccaggaacatctttcttcagaagcctgttctacccctgtcaccttggaagtttcttcaacaaaatatcaaacatctcttcctataaagtaaacgtctttgcaaatttgtggtccttattaataaatacaatggtgataacaataagacttcacttcttctgcctactttaagccaggtgtatcctttattttgtttgcatttgccattgctactgtcctgatagacagaagcgtgcattcaccaccgctgcccgttcaccttgattccctcaggaaatctaatttctagactctgagggttttcattgctgtcaaactcatttgatttgaaatcattttcctgaggcctttaactcaagaagtgttttatttataatattgaatatatttctttttcttttatttttcatattatattttattatacagtacttgttataaatagaagtacaatgattatattgtaatagaatcttcaactcgtctgtgggtgctgctgcagtttgtatctatgaaagcgaatgcactggtcagagctgatgtgattatggatcatgggtttcagggagtcttcggcatcagaccacttctccaagtctgggactcagtgtcccagatgcagccatgatagaggtgccctgagtctttcatagctgggaggggcatcatagccctcccaaattctctgatcagaaattgtggtggtacagacaccaaatttctttccccagagaatgatgatctctggtagggagctgctctagacccattttttattgtgccatcatcaaatcattccttgctcaggtaccctctgtctcctgggactgagtaaggccagggcacagatgggaattccttgtcttcctagaccttgtctctaactgctgccaccttcctccatgtgactcctgagacacctactcctaacagtggacaagctctgacactgaggctgaacagaacacagtccacaattgtaaccggtgctgcaacaacatgaaacaaaagcaatcaggacttccaacttatacagaaaatgaacatagaagagtagcaaagggcagatattactaatggacaaataggaaggaatcagtttctgctctaatgaaatcattcagttgtcttgagttaagcaggataaacatttcattgcaattacttcaagtcaaatgtagcagctccacaaccaaccagcatagctatttgctttgtgatcttggcagcttcaaaggactcagaaatcctttctctgcacaaacatccctttgtccattccaagacccaggatcacacactctgatcctatcatgaaaacaatgaggtgtgctatacttgctgcggcctcattttttgtgtgttgagtaggaagcactgaagaactttgaaagctttgctcttgagtctagggatgtgctggagccagcttgtatgagtcagaagaaccaaataggcatattactcttcccagctcccaagcagtgaagccatgttggccacttgaaatctaccatggtgggtatgctggtacaaccgaaattaggaaatgctaccagacatgcccccaccttcacagacaccccagtttatcagcacatccctggggtattttctgatgtccctgttatgccatttcttgtggggccaaaagggctcagaattcacctcccctctacttttgttcttagaagccatcacctaagggggcctcgattgttcctatttctattcaacctccagattctcttgctctgtaattctgtgtctcctgcaagcatgccagtctggaacatgacaactattttgaatgtaactaaaggtatcactgaaccagttcattatttacaaattatctttcctcgcatagaatattcagatgctggagtcattggcaacagagatggccaagtagcaactattcttctgtggcaacgagagaccctgtaaaaaggacaattttgctttggagactaagcacctccacaccagtcaggaatgactctgcttttactttaggctgagaggtcagaagggtcagaatactgagggtcagaggccctcagtattctcctttccaagacggagtatggccactctccatctcagtccctggaaggtgtccggagctccctgagaatccctgctctggggcagaatcaccaaggctcatcctcgccagctccccacaggctccagcagggctttcctgccaggtgcagggcacaggaatggctctatctgtctcttggttagagggaggctatgcaatgatgtttgtataagagggactgggattctgggtctccattaaagtatttgataatattttctttgttttttgttttattttgccatctcaccacttaggagagcaatcccttggtagttatattgtttttgcacttggtaaggtttttgtggttaagtcacattaagaaattgtgcctttttttcctgttcagctgtaacccaaggcagtgaaagaaacagcaataattttgaaagcagttacttatgcatcctatgataaaggtgttaagttccattgcccacatctaactttcagtctagtggaaatgaaaaggcacagttagggggcatgtgagcctgccatgagagaggtcaatgccaattgagaagtctgtgccaatccccagtactgtgggattgaaggggagggagagatgacctctccttcagaccatactcaacaaggagggagagggagttcatccatgggaacctgcggagaagcatatcccaggggcatctaactcagggtgcaggagcaaatcattggaaatgaaaatggtccacttcagctgtcacaggagacaggagaaagaaaagtcatacattccacagtcccctggctgattttcttccttatgatagtattttgcaccagcgtgtcctcatctcccgctgctcctctgcctctttcataatcatctcttccctctttgctgctcagatcagtggatgtgcattgtacaagctgatcatttcctgtagcagcacctttgctggtcttacttatgttcatccttattttgtgcattaggtattgctccctccaccattgcttatttccttgtaagaggtctcctttatatatttcaattttactttttattaatagacatttttaacttcatcttttgcttatctatgcttttggggtaacactgtcatttttggagggcatttttgtttatccttagtcattcagattaaataatctctttatacctcaacgtctgtgttttcttactatttaaaaccaaatattgtttcctttcattcctctccttctgttcctctttctttagatggtagttttaagggagaaaaagttagactataactggagctatgtgataagagttattcagaatgagggtgggatattaagattggtaactcaaagcaatagtcagggttagaagtagtgttgggatgagggtttagggaagctgctcataaaacctgcgggatggcacttctggaatattctggcagctcgctctgtagacatttctcagcagtccttgggccattgcagaagaaacaatgatgaaacttcacttattggccacaagatggcactgtggtccactgggaactaaagtactctgggcagtctgggagagcagcctaggagggaaagggttaagaaaaattcgggcttggatcccatattatgcagatgttgcagcagttttcagttattgctaggctacctacagctatgcaagaggcgggaagtccctctaatctttaatgacatctacagttgaagaatgttggctgggcagctttggtgtcagagcaggtgcagacagaggagcaactgcctcagaggaaaaggcgaaagaaaggggccggctgtgccctgagtccagtccatctctgctgcacttcatcttccctgcatgtctctccaggcaacagctttaacctccttgagtgatcagggattctacaagtttataagtcgtactgataacatcaccttggcttagattccattggataccaagcacgtgttctctggagggccaaaaatattgacaacaatttctaaaacacctaagtaaacaaactacagaaggaaaatattagtagatgcaccaaacagtgccgttagacctgaagataatcaatgagtagaattatcaaaaggagactataaataagtctctactaagtatttgtgggcatcgagcagtgtttgagtcctctcagggtagattaaggaaggaattcagctattatcttgactttggcttggatgaaaatccatgacctcctcaattgattttcttgtaaaatattacagaataatattgagcaaacattttatttttctccagcctgtatccctccttagcactaacaggtaaagcgaatacctagaggcaaggtttctttagttgggatccattaactgcaggactgggaggtccatagctaggcttcacagggagtgcaaaccccacgtgcagggaaccccgtgtgtctgtgctgtgcccaactcccctctgtgaggctgccaaagggggactgccgggtctcccaggaccccactcacaaagagggagaaagctgcttgctgggcaaaaaaatcaattcaccaattggccaatctgttgaaagccagaaagaaaagaaacgttcaattgtgagactgatgaatgcccaatttcccaagttataaaatgtatagcagctcatggttctcagaatgatttcaacagcatatgaagatatttttagaaagtttttgtttttctaaagcattccttgatattgatcctcacttgtttttcagcccactcatccgttgagcttaatttgatgccaaatttcaatgttgcctatttcagtcactgaccacttctcacattctccatatcttacacagatacgtgtgttcctgtcttttcttctttttgtgtgatgcatttttaaattgggctgtacagaatacaagcatacatttgtaaatgactgccatcttttatgcagtttagctgtttaatttttagtaacactttttattaaggtataattgagagtaaaacacaagtattaatacaaaaacatcctggtacattttgacaattgcatacaccagtgcaacagtaactgaaatgattataaaaaaaatttccatcactcaagaaagtgtcctcatgctcctttccaatcaatttctatcccagagataaaaacttttctgtttttatcaccattgactagctttgtctattcttcagcttcatataaatggaatcatattttattagttatttttctccaaaattagtatttctgaagtgtattcatattgttgtatcagtaggtcattctttcttatgactaatattccattgcataaatataccacaaattttttgtgcattctcttgttgatggatatccatgttattcctgtcttcaactattatgaataaagttgttgtgaacattcttgtggaaatctttcttttggacatatgcattcttttttcttcttttaaaacctacacttaagagtggaaatactgactcatagtgtagatgtgtgtgctatgcttgcgtgtccccacaaaagctcatgttgaaatttgtcagtggaatggtattgggaggtgggacagctatgactaggtcataagggatctgccctcagaaagaaatcaatgcccttattgggcgagtgacttagttttcccgggaatggtcttccaataaaaaggatgaattcagctgttttctctgtcttaagtgcttgcttccccttccttctgccttggataacagcaggaggacctcaccagctgtggccctttgatcctggacttcccagtctccacatctataagccaaataaacctcttgtctttatacattgcccagtccgtggtatttctctatagcagtaggaaagaaattgaaagaaaatatggcaccatgaggctgttgttataatacctgaaaatgtagaagcagctttggttaatgggaagtggctaatggatagaggttgaaagaattgggaggagcagactagcaaaagcctagactcctgaaaacagagcattaagggcaattctggtgaagtgtcagggggaaatgagggacaagctatcggaaattgaagcaaataccatccttgttataaatagcaaaaaccttggcaaaattgtgtcctgttctaggactttatggaatataaaattatgagccattcactaggatatcaactgaaagaaatatctaagcggcaaagcattcaggctactgtgtgactactttcgggcaccaggaaatttcacccagcaagaagggagccatgggaatagattttgcaaaccagcacagatggtaaccctacctccctctgctgtcctgtctcccataagccaaaccctgtgctgtgagctcttaaaatcctagaattatttctggggaatctatactcttaataatttatagacaacccaggtctgctttggatctgatcagacggactaaatcttggggactctgcaccactggccactgaagaaaggggctgggaatgttgatgggacaggaaaatataataagaaacattggtgtgaatctagtatcagaaagatgatgtgaggacaacaaggaagagctggaatgtgagggtttaatcacaggctcctcaccctccgctgatgggtaggtgtgttagctccagcatggagcaccaccgcactaggtgggggaagggtgagagggcaatggggcagcctgtgagctggggcaacgtaggcagagaaggaactgtgtcaccacagaaacttctgccttcacccatcccttcagctctgcaggacaggtagagactccaggatcatccactgagcactggacataaggaaggctgcatggggaggactcaggacagtgacatcacaggatacccctcctattaggaaaatcaaggcccagaattcactcggctcttccccaggaggaccaagccctgaatcaggtgcagtgctgcctgccccactgtgccatgggccctgggctcctctgctgggtgctgctttgtctcctgggagcaggtgagtcctgggcacaggacagcagccccattctcagctttcccacccatgtcctccactttaccttggggaggacctccaggctttctgctgtgctcatcctccatctgcttttcccacaggctcagtggagactggagtcacccaaagtcccacacacctgatcaaaacgagaggacagcaagtgactctgagatgctcttctcagtctgggcacaacactgtgtcctggtaccaacaggccctgggtcaggggccccagtttatctttcagtattatagggaggaagagaatggcagaggaaacttccctcctagattctcaggtctccagttccctaattatagctctgagctgaatgtgaacgccttggagctggacgactcggccctgtatctctgtgccagcagcttggcacagcccggcagagtctctgacattctatacataaacttcctgccttagctttgacttgagagctgcaggccccacccaggtttcactcctgcaagggaagcttttagttgtatggaaggcatgtgttgtgtcctactgagcacagagctctcccaaacagagcccaggtttcctatgccctgagtgtgccggcttctgtgcagcatcttcttgcagcttgtcacttcctgggtaacttcagtagaagagtgactgcggagccccagatgtgtgctagattctttgaatttgttatatagcttaaagtctttcaacaaccttgcacatcaatcattcttattcttccttgacagatggaagtctcagggacattcagtcattttccccagtgtctcctggcttgtaaggaccagaagtaggaaacaaagtagtgcatccattttccacctacccccctgctccatcatcaccttctgtgtcctggtcagtaagtcagagccctcaaactgccatctagtgaccagcagggcctcactagaggcttacatgtcttcaggggtcattactctggcctcttcattagaaactttgaggaatgttaaatttaacactttttaaaaatcatttatatgcattccctttgtctatccccagtctgcagcctacactttcatttttatggtgttttacacaagtttaatttaatgcaacaataactaaaaacaattttgtttgtgtgtagacaaaaactgctttctcatataaatgtctaatgatatttttctcaatttattctactaaaatttaagtttggattttcaccaataagaataaatgaacctgaaatatatctcatgtgagaaataagatagagacctaggaattggagggaagcacatatgttcagtgaagaagcaatcgtctgtcaaaaagagctctaaagtggacacctcgtgctgacagtggagagataattggaaggcaaattatcatgaaccttgtctgtctattgtcttgtagaagaaagacagccaggagcagagacaacatgggcgaatgtttatgactggacttcaggttgaaggttgcagcaggtagagggaggagttgcaggcagagggcagaatcactagctggcaggggcagtggcatcaccagtgactctactgacatccaggaattatgtccccaacgcacaagctgaaaaacctcccacaattcgccgaattttccctgaccctgccttggccaccagatttctcaatggtgcggccttttacctcctgggggcaggtgagtcccctaaagccttttccttggcttaccacatcctagcctaagcctttaccacaggtctacattattgaggtccctctttgggcactcaacttccttctatcatagacttcatagaatctgggataaccagatcccaagataccagagaacaaaggcaggatgcgaagcaacatggagatgcctaagactgtcatccatgacatgtgtaggtgttaataggagctgaagctggtgcacagctgatccgtcccagcacacactacagagaaattgctgagggtctgtaactttctctcaaagctaaatatgtggccttggtgtcagacagcctctcccagacctctgtgccctcttgcaccagcagtcaccccacagccaccttcctctgcacacaaagctcagtggaagatataggtggcctcgtcttcacgagactgcgatccaggcagcggaagacgttgtcccatagaagtctccccaacactgcccaggctggggccctcagatttctgagcagctctgtgcatgggaaactctgccctgtgctgagcttctcttccaggccagtctcagctggacgacggaatgtactttaccatgatgtgagtggatgcagcctctcttccaggcccctcctgcagctctggcctcagaagtccttttcttcagttattctcgaaaggaaagctcatttgaagttgtatatttgcagacagcattgacaacacaggtctatgttcttttccctgtcagcattcacaactccatcttccccacaccacgctcatatcagtcctcagcctcctccacgtgatgtccgctcccagctgtcctctcccttcctctgcatcctcacctccaggtcaaccacagatgcctcagttcaggccattcctcacgcgtcatgctcctcctaccaaagccctttccactccacgctgtatcctctgggtcaacacaagtctcttcttttttgttcttgctccaaatctcagtttaaccactaccatctctagggatacgctccttcaacagttttcctaggctgcacctccttaatataaatcctcacagctcataatgtgcgttagtattcatagatttaacaccattgtcattttccatgacttcgggtgactaatggactcttctcttgctctctagactgtaaaacgcatcattttagaaattgtggatgttttgttcctgattttatcatcagtacaaacagcggttccaggtgccagtggccaatcttgaaagaataaaggatggatagtgaaaggccctctgggttcccacgtagagtgtttcagaagtctggacgcattaagcgggaacctctatcccttcatctcctaggatctaatgagtcctggaaacagaggagaaatccctgtcatggatgagtaactggatccaagcctttctgcaggactgaatttcctaactgcccaccgccttcctggcttttctcctccaatgtccttccctcacaggtgtcctggatttgggagtctcacagacacagcacacctaatcattggcagagtggtgtgaaatatagcattaaatactggcattaaaaggtgatggaggctgggtgcagtggctcatgcttgtaataccagcactttgggaggtcaaggagggcagatgatgaggtcaggttagcctggctaacatgtgaaaccccaactctactaaaaatacaaaatcaaaattaaccagccgtggtggcagtcgcctatagtcccagctactcagtagactgaggccggagaatggcgtgaaccagggaggtggagctcacagtgagctgagatctcaccagtgtactccagcctgggcgagagagcaagactctttctaaaaaaaaaaagttcatggagaaaaaaacaaagggcttctccattctttgggtggctttgaggccatggtggctgctacactgaactatatcattagtctccatttccatgaattggtgggcaatgccagagacacagagttcatggtcaccagcttcctccagcccacacctgattttggttcagggcactgaagagagacctttgcttgttcccctcctttgccagttaggaaaggctggttgtgaggcagaggctccacatatagagcagggctatgtgttagtccctgaagaattgtgagagccattctgggtggaaataatcaaatatacaatcaccaaggatggcctacagatagaccgaagccccaattttgctggagtgatttgcatctatgctttaaagacaaatgcagttttatctctttaggcaataaagaccaaaaatagactagctattttaaataattgaaccttaaacagaccacagtcagaacatcttccctagggacagcattttcttccacccactcactaaagctctatttgagaaagctgtgtgctgttgataaacactggaatatcgttacaatcgacattgtaataatactgctacttggatcagaaacaaagagcatttctaaagcttgaacaatgtaaaactggaaacgagctctcactgagtttggaaatgcaggcactagagggtgctcatttctcttccttttccaatcaggggctattcaaaggctgttctagaacaaggggtgagatcctccacttccccgtggtgatcaggctttcacaggtagaagccttattagttcataatcagccaagctgacctcaccatcaaatgtatcgacctcgatgcttaccctcctcagcagtcagagactgtctgtgttcaccaggagctcgtgtgcttttacagagcacactttctcctcggtttagtaaaaaaaataaatgggccattatagggggttccataaacagaagctttctgtactttgcccatttagacactacaaattctgatgtctgacgaatagtgtaaacttaaagcttgcatgtggttaagaacttttaataaacaaattaaataatatatataatgaaaatgtcaataatgttctccaatccaatcccaccttccactcataaccaatattaacgctctggtgtgcttcttttcacccctcttttctgtgttcatgcacacctttctacccaagtacacctacagaaaatgggttcacctgtacactttacctgccacatgcatactcttttctgttaatatatcctggtctttattgttccagattggttgatatagatctaacttgctcctattagctgcttcacattgcataatgagggtagacaggtacatttgtgctctattgtctgattcctaaattctgccagatcttttccaaagtgactgaatggcctctttgtgcttccgagttcctctcaccccagcacccagttgatgattccagcgtttccatcactcatagtcctggcaggtttgagagctccattggttcctcctgcatgaggagacagggacggataaaaggatagacctttatcaaacctaacagagactacacggtatctcagttcaacctcataaagcattgaggggaatgttagtcttgttttatagatgagtctagatgaggctagaatccaggaaagttaatgaatggccttgcccacggtctcagagctaataaatggtggaggcagatgaagggcagtcagcctgcttccatgtggaattgatagaggggtcactggactttgacagaggggaagtctagaaccatctggggctgtcttcagatcggacaccagagttaagagagcctgtgtaccctacagcactgcagatagaagcatcatggtgttggcagtggggaggtactagagtgtgtaagtggttagtggcctacaaccagaagacctgagttttgagaaaattattcccatcacaagatgtagcagagacagtgatatggatatactagaccagagagctctgtgaggagctctgtgaggagctgtggcctaatcatgcatcaggccacgtttgtgtccataggtcatgggcagtgctgggtggccaccatcattcatacagagagggcagtcagcagcgtgaggtggttctgcctgctgtggtctcaccccaggcatggaaagcaagagccctgggagcagcggaaggtgctcagctgggcttgtcaggagtctcatctgtcagtggattgacaagaaacagagcaaaatgattcctccaatgttgatgagcctgcccgtgggatctggaaagctaataacagagaaaaccaatatagacaaaggattttaaacaggattatggtcaattaagcaaattagaaaatgatacttgaaggagtatttgggacgcagtagtcaaaaacaccaggaagacatgaggaattgccctaagactctagactacagcactatgtagataactaacaccagactattaattatatcattgaaaaaataaaatttacagtaaattacaaactgtttaccaaaggttatgaaaatcttgtagacttgttttaattcagacaaatgttttcttctcattgtcagctgttctctggcgcatttattttggattgaaccatctggggaagaggcgtggcctctcctgactggaaggctctggggcccaggcagggagaatgaggtctcagaatgacttccttgagagtcctgttcccctttcatcaatgcacagatacagaagacccctccgtcctggagcacctgccatgagcatcagcctcctgtgctgtgcagcctttcctctcctgtgggcaggtgggtcccggacagggccccttgcatagatttcaaagcccagcccctttccattggggctgcagcatcagctgtttccttctctgcaggtccagtgaatgctggtgtcactcagaccccaaaattccgcatcctgaagataggacagagcatgacactgcagtgtacccaggatatgaaccataactacatgtactggtatcgacaagacccaggcatggggctgaagctgatttattattcagttggtgctggtatcactgataaaggagaagtcccgaatggctacaacgtctccagatcaaccacagaggatttcccgctcaggctggagttggctgctccctcccagacatctgtgtacttctgtgccagcagttactccacagcgctacaagaccatctcctctctgcacataaaggcagggtggctctgcccttcctcccccacccaagactcagggatgacctgggcagagttttctgcaatggggaccttggaaccccgagtggccctaagtggcccggacagtatgagcctcagtctgtgccgggtgctcctgcagccatctcagccaggcctggactggtcccaggtcctcagatgtctcctttgttgctctctctggtctatcctctgagctctccttttggggttgggccagggcttccccagctcctacttttctactcatcatcctgactccgaggcccccaggatgaaacaggatttgtatttcagatccatctaggctgtcctctccctggtgagcatgctgcttcctctatctagagttttcccctcccccaccccacccatggtctgtcctgtggcctatctttcccatctgggcagtcaccttccatcccccgcctccccgcccctctctactgcagccatggggggagcacctcttctgagactccttccttcccatcacagagacttcaaaggccatttcctctgccctggatggagacttcctttctctagtggccagctcctacctgtgcttcagatctcagaatgatctgccctcccgcaggaagcaatccctcaccgcccagctgagatcaattttcctctcataagctctcatagaatcatatgtctcttagtaacccttaggacaattaggctttctcagatacttgtctgatgatttttgtgctctacccaattttttttttttttctgagacagtctcactctgtcaccaggctggagtgcagtggcatgatttccgcttactgcaacctctgactctgattccagtgattctcctgcctcagtctcccgagtagctgggattacaggcatgtgccaccatgctcagctaattcttttttgtatttttagtagagatgcggtttcaccatgttggccaggatggtctcgatctcctgatctcatgaaccacctgcctcggtctccgaaagtgctgggattacaggcgtgagtcaccgtgcccggcctctccactcaatttttgagcccatgagagctaaggctgtgcctgctgcattaacaacatcagtgcctggcgtgtggggatacccatttcacagagaatggatgagtgaacgagaggctgaatgagtgatgagtgggtggacgaaccaatagtaggaacacactacatctactgtaaactggcagaggtctagcattaagtacaagaaagcccacccctttgattgctgggctcaggtcgatcttggaaattgatggggaatcactatcatggcggccacatctggctcaaggctttctcttgtggctgcagtacctgacctcctccaggtctctgtgctctctttcagggtctttccccacaacaaatctagacagatcagagatccacttctagaattccatccttaaaggttgttccttgaaaccacttctggtaagaaaatctccattaggtttgcatcaataaaacagggccactacaagtttgagagtgtaacagatttatgatcagaattagactttatgcatatgtgggaggagctgaggaagacaaggtctggaggagagaagtcagaaggtgagggagccagtcagtagtcagggctcctgaagctctgggcaggacaggctagagtggcagggacatgagaggatcagagcataccaggacatgcagtgggaccttgagccgggagcacaggaaaaggccaaggaaacctgcttctggggaagctgttccttgtctatgggggccacccctgcaggtgcactgccaaacactgtgggcagcctggctgctgttggccaacatttgggaagatgaactggacacagggtgcagaaggaacaggacttccaaggtctgttggatgcctctgtatctgctggtcactgactctcactgtctgaccacaatgacttgccaattgttatagtgactgttttatatctgtcttctaaattttaccaaatgtatccttgaccatctctaaccagaatgataacagaaatggcattctgggaaagtcagactcttcatttgcaaagttgacttaacacaatccagcacaggatggattctcccagattaaggcatcagatcacacaactgtctcgacctgccacggtccatggactcctctccgggggacacctgtgctgcccaggtgaatgtggacacaatttgtatgtagatgttccagacgctggtgactaacttttcttttaatactgtgtctgaagtctctctcacccagagggtctatatatgtatgagtatatatgtatttataaatatgtatgtgtaatttctccttagaagaaaatgtcatgatgactacatggcttaatggcatttatttatgaaagagctttattaaaaataattagaaaatttgaattctattctgaatttttccttgggagtgtcctgagagcatttttgaccctaccgacttttgtcatgtgtgtatttggcagcctagagtgcagcagttattggcgccatacattagggagttagactggagatggctgcaaaatgactgactcttagtgttattcactctcactctgggcctcactggaatgtcacagactaccatcgaacaaatggattcccagtatgaagaatattaggagatagcaatgaggaaacatgagcacaagcaacaaacatttgaagtgcaaacctgaagactcgaaatgttggcattataagatatgaaagtttggtgagctacatttaaatgaacatgacggggaactgaaactaggaaaaagacaatgcctgaaaccatcaactttcataacaattgtcaaaaaatatatctaggaatgcctcatacaatcactgaaaacaaaatggaaagtcaaacagttgattagctcctcctacagagatttttagtgatttcaaagatggatctgcaggagtgatctagaatgcagcacggaaaatgaaaagtgaaatatgaaagaagttagagaacagggaagaaaaaaatggatgtttcccatatattagaatatgcatatttttcataatttcccattttttgttgcatatgattgaattttcagacagataaaataggtagaatgttatgaggtgatatttatgagatgttagctgagaagttttttgaggtgtttaaggacctaaattcagagtttccagaatcacaatgaatctcaaataaggcagtcaagtcataagcaaattgtagaacatgacggacaaagagaagattttgaaagccgtcagaaagaaaagacaaatacgtcccataggaatagatggagaacaacagtaagttaagacagtggtaaaaataaccattagctcaattatcattctccttcatttaaggtaagattgattaaaaaaaataacttttagaaggggaacatgaaaaatgactgctgtgagtttgctatcaaggtttcttttctgaattacagttaagaaaggtgggaaatgatcccagaagaaaggcatgagggcagttcgtgaggtaacccaagtgatggggctgcccgttgggcacgtgtgactgagggaatggaggaggctggggcataaatggggatggcagaggggaccctgaattgcaggatagacaatgagctaatgccttggtgccttgttttggggatgctgttggcacatcctacaagacatgcccagcagacagaggagtggctgtaggatgagaagatgaactcagagatgcagtgtgagcctctggctccagacagcacgggagcccaaagcaatgagccaggcattgatgttgttaaaaaggagcttataaatatttaaagtgtgttctaatataaatactgtgaccctgacatcctggggattgagagaggaagtgatgttactgtgggaactgccctgtggagacaaggacattcctcgtcctctgctcctgctcacagtgacactgatctggtaaagcccccatcctggcctgaccctgccatgggcaccaggctcctctgctgggtggtcctgggtttcctagggacaggtgagtcctcagaacattaagtagttttattttttctctgtgtgtaggtgtgtgtgtgtttgtgtgtgtgtgtgtgcgatgactacagatgttttccttattctgttgccaaattctatttccacagatcacacaggtgctggagtctcccagtccccaaggtacgaagtcacacagaggggacaggatgtagctcccaggtgtgatccaatttcgggtcaggtaaccctttattggtaccgacagaccctggggcagggccaagagtttctgacttccttccaggatgaaactcaacaagataaatcagggctgctcagtgatcaattctccacagagaggtctgaggatctttctccacctgaagatccagcgcacagagcaagggcgactcggctgtgtatctctgtgccagaagcttagcacagcgtggcacagtcgcgtccttcctgctcacaaacctcatccttctctctccttgcacctcctagagacccttaatagaggcctatctttgatcctcacttttcgtgggaaataagtagatttggacatcggctgtcctttgggtagaaagagaccacagattcattcctgaaacacagtgactgcaaatgtaggtggtgaaaacaatcacgtcccactgccctctaggagtgcttggagccagctcactgctccaaacggagtgggtgtcttagcattggccttcagggcagacatgcatcttctataggtcttggaggctgctgtgttacccacatatatgaggttgtcaagggcaggaaacatgctcttctcctgcatattttggggcatctggaaggtctgaggctacatccccaggaatatctttcttctaaagcctcttctattcctgtcaccttggaaatttttgcaacaaaatatcgaacctctcttcctgtttaaagtaaaggtctttgcaactttcgtggtctttacttgataaatacaatcatggtaacaataagacttcatttcttctgcctactttaagccacttgtatcctttattttatttccatttgccattgctactgtcctgatagacagaagcatgcattcaccactgctgcctgttcacatcgattccctcaggaaatctgatttttagactctgagtgttttcattgttgtccaactcatttgatttgaaataatgttaccgaggcctttaactcaagaagtgttttatttataatattgaatctattcctttttattttatttttcataatagatagtactatatagtacttgttataaatagaagtacaatgattatattgcaatagaatcttccacctatctgtgggtgctgctgcagtgtgtatctgtgaaagcgaatgcactggtcagagctgatgtgattatggatcgtgggtttctgggagtccttggcgacagaccacttctccaagtgtgggactcagtgtcccagatgcaaccatgatagaggtgccctgagtctttcatagctaggaggggcatcatagtccttccaaattcactgatcagaaattgtggtgtggtacagataccaaatttctttctccagagaatgatggtcactggcagggagttgctcttgacccattttttcttgtgtcgtcatcaaatccctccttgctcaggtgccctgtgtctcctgggactgagtaagtccagagcacagatgggaattccctgtcttcctagaccctttgtctaactgctgccactttcctccatgtgactcctgagatagctggtcctaacagtggacaagctctgacactgaggctgaagaaaacacagtctatagttgtcaacggcgctgcaagaacatgtagcaaaaacgagcagggcttccaatttatactgagaatgaacatgcaagaggagcaaagggtagaaggtactaatgaacaaatagcaaggaatgcagtttctgttctaatgaagtcattctgttgtcttaagttaagtaggagaaaactttcacagtaattacatcaagtcaaaggctagcggctccccaaccaaccaacatagctatttgctctgtgatcttggcagcttcagaggactcagaaatcctttctctgcacaaacatccctttgtccattccaagatccaggatcacacactgatcctatcatgaaaacaatgaggtgtgctatagttgctgtggcctcattttagtatgttgagtaggaagcattgacgaactttgaaagctttgctcttgagtctagggatgtgctggagccagcttgtatgagtcagaagaatcaaataggcatacttttcccagctccctgttcagtgaagccatgctgggagcttgaaatctgccatggtgggtatgttggtacaacagaaattagcaaatgctaccagccatgcccccaccttcacagacacccagtttatcagcacatcactggagtattttctgatgtccctgttatgccatgtcttttagggacaaaagggctcagaatttatgtctcctctactctgttcttagaagccatcatctaagggggccttgattgctcccatttctatccagctcccaaattctcttgctctgtagctctgtgtctcctgcaagcacgccagtctggaacatgacaactattttgaatgtaactaaaggtatcactgaaccagttcattatttacaaattatctttccttgcatggaatattcagatgctggagtcattgggaacagagatggccaagcagcaactctgggttgtgaaacacttacagccccgctattcttctgtggcaacgagagaccctgtaaaaaggacaattttgctttggagactaagcagctccccaccagtcaggaatgactctgcttttactttaggctgagaggtcagaagggtcacaccctcaatattctcctctccaagacggagtgtggccactctccatctcagtccctggaagttgtccagagctccccgagaatccctgctctggaggcagaatcaccaaggctcatcctcaccagctccccacaggctccagcagggctttcccaccaggtgcagggcacaggaatggctctgcctgtctcttaggtagagggaggccaaacagtgatgtttgtataagagggactggggttctgggtctcctttaaagtatttgacaaaattttctttgtttttgttttattgtgccatctcaccaatgaggagagcaatcccttggtagttatattgtttttggcacttgggaaggtttttgtggttaagccacattaagaaattgtgcctttacaggaaattatgctgtacaggaaagttcagctgtaacccaaggcagtgaaagaaatagcaataattttgagagcagttacttgggtatctatgataaaggtgttaagtttcattgcctacatctaactttcagtctagtggaaatgaaaaggcacagttagggggcatgtgagcatgccatgagagagatcgatgccaattgagaagtctgtgccattccccaatactgtgggattgaaggggagggagagatgacctctccttcagactgtgctcaacaaggagggagtgggagttcatccatgggaatctgacgaggagcaaatcccaggggcctctaactcagggtgcaggagcaaatccttggagaggaaaatggtccagttcagctgtcacaggagacaggagaaagcaaagtcatctaatccacagtctcccggctgatttgcttccttatgatgctattttgtaccagcgtgtcctcatctcccgctgctcctctgcctgtttcagaatcatctcttccgtgtttggtgctcagatcagtggatgtgcattgtacaagctgatcatttcctgtagcagcccctttgctagtcttagttatatccatccttattttctgcattaggtactgctccctccaccattcattgcttattgccttgtaagaggtctcgttttatatatttcaattttactttttattaatagatatttgacttcatcttttgctgatctatacttttggggtaacattgtcatttttggaggacgatttgtttatctttagtgattcagattaaataatctctttatacttcaatgtctgtgttttcttcctattttaagccaaatattatttcctttcattcctctccttctgttactctttctttagatggtagttttaagggagaaaaagttaaactataactggacctatgtgataagtgttattcagaatgagggtgggatattaagattggtaactcaaagcaataatcagggttagaactaatgttagacttagggtttaagggaagctgctcataaaaccagcgtgatggcacttctggaatattctggcagcttcctctgcagacacttcccagcattccttgggccattacagaagaaacaatgttgaaacttcacgtattggccacaagatggcagtgtggtccactgagctcgaaagggctctggggagtctaggagagcatcctaggagggaaagggttaagaaaaattagggcttggatcctgtattatgcagatgttgcagcagctttcagttattgctaggctacctacagctatgcaagagacgggaagtccctctaatctttaatgacatctacagttgaggaattttggccggggcaaattttggtcaggggcaggtgtagaggagcaactgcctcagaggaaaagggaaaagcgaggggtgggctgtgtcctgagcccagtgcgtctctgctgcacctcatcttccctgcaggtctggccaggcaacagctttaacctgcttgagtgatctggaattctagaagttcagaagtcgtactgataacatcaccttggctgagattccattggacaccaggcatgtgttctctggaggacaaaaaatattgagaacaagctctaaaacacctaagtaaacagactacagaagaaaaatgttagtagatgcaccaaactgtgccgttagacctgatgataattgactagtagaattaccaaaaagagactataaataagtctccactaagtatttgtgttattgagagcagtgtttaagtcttctcagggtagattaaagaaggaattcagctattatcatgactttggcttggatgaaaatccatgaagtcctcaattgattttcttgtaaaatattacagaataatattgagcaaacattttatttttctccagcctgtatccctccttagcactaacaggtaaagcgaatacctagaggcaacgtttctttagttgggatccattaactgcaggactgggaggtccagagctgggcttcacagggagtgcaaaccccacgtgcagggaaccccgtgtgtctgtgctgtgcccaactcccctctgtgaggctgtcaaagggagagggccgggtcacccgggaaccccactcacaaagaggggagcaggctgcttgctgggcaaaaaaatcacttcaccaattggccaatctgttgaaagccaaaatgaaaggaaagtctgaatgtgagagtgatgaatgcccaattttccaagttatgaaatgtatagcagctcatggttgtcagaatgatttcaacagcatataaagatattgtaaacagcttttgtttgtctatagctttccttgatattgatcctcagttgtttttcagcccacgcatcagttgagcttattttgataccaaattttaaagttgccacttcagtcaccaagcacttctcacattctccataacttacagatatgtgtgctcctgtcttttcttatttttgtgtgattcatttttaaattgggctgtacagaatacaagcatacatttgtaaatgactcccatattttatgcaattaactgtttactttttagtaacaattttatttaaggtttaactaatagagataaaaacagaaatattaatacaaggacaacatggtaaattttgacaaatgcatatgccagagcaacggtaactgaaatgattataaaaaaatttccgtcatgcaggaaagtgtcgtcatgctccgttccaatcaatttctatcccacagataaaaacttttcttagttatttatttattttgagacagtctcactctgtcgcccaggctggagcacagtgctgtgatctcagctcactgcaagctctgcctcccgggttcatgccactctgctgcctcagcctccagagtagctgggactacaggcgcccgccaccatgcccggctaatttttgtatttttaatagagacggggtttcaccgtgttagcctggatggtctcgatctcctgacctcgtgatccacccacctcggactcccaaagttctgggattacaggcatgagccacggcgccaggccaaaacttttcttatttttatcaccattgactagcttggtctattcctgcactccgtataaatggaatcatataacatttttattgagttattttcctccaaaattagtatttctgaagtgtattcatattgttgtatcagcaggtcattctttattatgactaatattccactgtgtaaatataccacaacttgtttatccatgctcccgttgatggatatccatgttactcctgtcttcaactattatgaataaaattgttgtgaatattcttgtggaattctttcttgtggatatatggattcttttttttttattttcttttaggtatagacttaagagtggaaatactgactcacagtgtagatgtgtgtgctatgcttgcgtgtccccacaaaagctcatgttgaaatttgtcaatgtaatggtattgggaggtgggacagttatcactaggtcatcagggatctgccctcagaaacagatcaacgccctattgtgggagtgaataagttgtcttgggaatggtcttctgataaaaagtatgaattcagccactttctctgtcttgggtgcttgcttccccttctttctgccttggataatagcaggaggccctcagcagttatggccctttgatcttggacttctcggtctccagatctataagccaaataaatcccttgtctttataaattacccagtctgtggtatttctctacagcagtaggaaagaaattgaaagaaaacatggtgctgagagtggcgctgttgctacaacaaggacctgaaaatgtagaaacagctttggttaatggcaaatgggtaatggatagaggttggaagaattcggagaagcagacaagcaaaagcctagattgctgaaatagatcattaagggtaattctggtgaaggctcagggggaaatgaggaacaagatatcggaaatcaaagtaaatgctatccttgttgtaggtagcaaaaaccttggaaaaattgtgtcctgttctaggactttctggaataaaaatattatgagctattagctaggatatctactgaaggaaatatctaagcagctaagcattcaggctattgtggactactttcaggcaccaggaaatttaacccagcaagaaaggagccaagggaatagattttgcaaaccagcacagatggtgacactacctccctctgctgtcctgtctccaataagacaaactcgctctggagttagagaaaagaggagccagttaacataatacactggggtcagcttctgaaggcagggtggatctgaagggaataacataaactgtccagagcactacgtataggatgaccttgagggtgctgagtcccaagctggctaggtctgtgctatgagctgagaaggccctagaattatttctggggaatctgaactcttgataatttacagacaacacaggtctgctttgattctgatcagatggactaaatcttggggactctgcaccgctggccactcaggaaatgggttgggaatgttgcctgagacaggaaaatatgataagaaacatggtgtgaatctagcatcagaaagatgatgtgaggacagcaaggaagaactgcaacttgaggtttaatcacaggctcctcatcctcccctgatgggcaggtgtgtgagctccaggatggagtaccacagcactaggtgggagaagggtgatagggtggtggggctgcctgtgagctggggcagtgtaggtagaggagcaactgtatcaccacagaagcttctgccttcacacattcctccagctctgcaggacaggttgagtccagggtccgtagtgcgctagacttaaggaaggctgcatggggaggacacaggacagtgacatcacaggatacccctcccatcaggaaaatcaaggctcagaactcactgggttcttccccaggaggaccaagccctgaatcaggtgcagtgctgcctgccccactgtgccatgggccctgggctcctctgctgggtgctgctttgtctcctgggagcaggtgagtcctgggcacaggacagcagccccattctcagcttttccacccgtgtcctccactttaccatggagaagacctccaggctgtctcctgagctcatcctccatctgcttttcccacaggcccagtggacgctggagtcacccaaagtcccacacacctgatcaaaacgagaggacagcaagtgactctgagatgctctcctatctctgggcacaagagtgtgtcctggtaccaacaggtcctgggtcaggggccccagtttatctttcagtattatgagaaagaagagagaggaagaggaaacttccctgatcgattctcagctcgccagttccctaactatagctctgagctgaatgtgaacgccttgttgctgggggactcggccctgtatctctgtgccagcagcttggcacagcccggcagaatcactgacattctgtatataaacttcctgccgtaactttgacttgagagctgcaggccccacccaggtttcactccttcaagggaagcttttagttgcttggaaggcatgtcttgtgtcctactgagggcagacctttcccaaccaatagagcccaggtttcctgtgccctgagtgtgcctgcttctgtgctgcatcttcttgcagcttgtcccttcctgggtaacttcagtataagagtgactgctgagcgcttggtgtgtgctagatttttgtatatgttacatatcttaaagcttttccacaaccttgcaaatcaaacattctcatccttcctttacagatgggaggctcagggacattgagtcattttccccggtgtctcctggcttgtaaggatcagaagtgggaaacaaactagtccatccattttccacctacccccctgtttcatcaccaccttctgtatcctgttcagtaaaccagagccctcacactgccctctagtgaccagcagggccgcagcagaggctcagatgtcttcagggggttattactatggcctcctaattagcaattttgaggaatgttaaatttcacactttttaaaaaatcatttatatgcattccctttatctttcccatgtctgtagcttacattttcatttttatggtgttttttgatgtacaagagtttaatttaatgccacaaaaatgaaaaacaattttgtttgtgtgtagacaaaaacttctttctcatataaatgtctaaacatatttttcttaatttattctagtaaaatttaagtttggcttttctccattaagaagaaatgtacctgaaatatatctcacgtcagaaataacatagagacctaggaatgggagggaagcacatatgttcagtgaagaagcaacagcctgtcaaaaagatcccaaaatggacaccctgcgctgacggtggagaggtagctggagggtaaatgatcacgaactttatcaagctgttgttgttagaagagggacagccaggagcagagaccacatgggtgaaggtttatgacttgactctaggttgaaggttgcagcaggtagagggcggaattgcaggcagagggcagagtcactggctggcaggggcagtggcatcaccagtgactctactgacatccaggaattatgtccccaacacacaaagtgaaaaaactcccaacaatctgcacatttttccctggccctgctctggccaccagactcctcagtggtgtggccttttgcctcctgggggcaggtgagatctttaaagacttttccttggctcaccacatcctagcctaagcctttacatcaggtctgcattattggggtccctccttggtcactcaacttccttctatcatagacttcacagatgctggaacaacctgatcccaagataccagagaacaaaggcaggacgcgaagtgacatggagatgcctgagactgccatccatgaatacaggtgcagatgttaataggagccgaagctggtgcacagctgatctgtcccagcccacactacagagaaatccctgaatgtctttgacttcctctcaaagccaaatatgtggccttggtgtcagacagtctctcccagacctctgtgccctcttgcaccaggctttaccccacagccaccttcctctgcacacaaagttcagtggaagatataggtggccttgtctttacgagatcgtgatctgggcagtggaaaacattgtcccataggagtctccccaacactgcccaggctggggccttcagagctcggagcagctctgtgcatatgaaactctgccttgtgttgagcttctctgccaggccagtctcagctggacaaaggaacgcacatcaccatgatgtgagtagatgcagcctctcttccaggcccctcctgcagctctggcctcagaagtcctctttctcaattgctctcaggaaggaaagttcatttgaaattgtatatttgcagacagcattgacaacacaggtctacgtatgtccaatcccatcttccatttgtaacaaatacaaacactgtggtgtgcttcttttcacccctcttttctgtgttcatgcacacctttctacccaagtacacctacagaaattgggttcacctgtacactttactggccacatgcatactcttttctgttaatataccctggtcttattgttccagattggtcgatatagatctaacttgctcctattagctgcttcatattgcataatgagggtagacaggtacattcatgctctattgtctgagtcctaaattctgccaaatcttttctaaagtgactgaatgacctctttatgcttccaagttctcctcaccccagcacccagttgatgaatgcagcttttccatcactcataatcctagcaggtgtgagagctttatcagtttctcctgcatgaggagacagggagagataaaaggatagatgtttatcgaacctaccagagcctacacagtatctcagttcatcctcataaagcatggagaggaatgtgcgtcttgttttatagacgagtctagatgtggctagagtccaggaaggttaatgaatggcattgcccatggtctcagagctaataaatggtggagccagatggaggacagttggcttgcctctgtgtagaactgatagaggggtcactggagtttgagggaggtgaagtctagaaccatctggcgttgtcttcggatcagacgccagggggcagtagagtctgtgtaccctacagcactgaaggtaaaagtatcatggtgttggcagtggggaggtactagagtgggtatgtggttagtggccaggaaccagaagatctgaactttgaaaaaatttttcccatcacaagacgtagcagagacactgatgtggataatctaggccagagaactgtgtgacgagctgttcttaaaatgagggagggaggagaagcaactaagggtcacttcctctacatgaaatggagaggaaaacaatgttaactagaatctcatctgattttagtcagttttgctttgtaagtagttgcaaggtgggacaatttatttttgacattaagtaaacatctatacggcttctttaccttatgaagtctggtggtgaaggcaaaaatggtacggccaatggagtcacagtttgtttaataaataactcagagttcaaatggagactctcatgggccagaaattggtaaatgttcctgcattctaaaattaggaggatcttattttctttgaatcaacagagaaggaagcacaggcagtggggagggacagtagggaactcggcagagtggccacagaatgtggaagacaaaggacatgtaataccaaattctaagctgtgaagttgtgatgcaaccctcctccttctcctaatgtttttcaggtctcagcacagatgcacacctgagggagtaacttctttggaaatgaaggacaaatagctgtgtaataataagtccaccttacaaagcacaactggaaatggaaacaagattatttctaaggccttttctactctaagagtaacttagtagcaagctgagaggtgaggatggggggatgttcatccacacgcaatgagtaccatgaggctctaccatgaagcatatagtcctcagtgtgaatcagagccctaagaagaataatgccctttacattgctttgccctctgccatcctaaacccatcccacccataattaagcagccatggaaatgaagggagccagaaggaatcaaaccctgctgcttggttcagtagacagagggacctgggggcagggtgttggctgggtctaggagaagatgatgagctcagaaaatagacaaggagaaaccccaggggaaagcttgtaaaatcctggaggaatcacaagatatattatttgagctcctttttatttattactaaattaatggcaggaatcccatataaagggatattccttatgaaacatgacatctaaagtacaaacagaggattcttccttaccctaaatcctgccctctctccctgagtctcttacgcatcaggccacctttgtgcccataagtcatgggcaacgcagtgtggtcaccttcatccacacctagaggacagtcagcaaagtgaggtggttctgcctgctgcggtctcaccccagacatggaaagcaagagccctgggtggagctgaaggtgctcagctgggtttatcaggagtctcatctgtcagtggattgacaagaaacagagcaaaacgactcctccaatgttgatgagcctgcccctgggttttggaaacctgataacagagaaaaccaatatagacaaaggattttaaacaggattatggtcaattaagcaaattagaaaaagatacttgaaagaatatttgggacacaggagtcaaaaacaccaggaagacatgaggagtgtccctaagactctagactacagcactgtgtagacaactaacaccagaatattattatattatcgaagtaataaaatttacagtgaattacaaactgtttccaaaaggtcatgaaaatcttgtagacttgtttcaattcagacaaatgtgttcttctcattctcagctgttcactggtgcatttatcttgaatttgaccatctggggaatgggcgtggcctctcctgacaggaaggctctgggggccaggcagggagaatgatgtctcagaatgactcccttgagagtccagttcccctttcatcaatgcacagacccagaagacccctccgtcctgcagcccctgccatgagcctcgggctcctgtgctgtgtggccttttctctcctgtgggcaggtgggtcctgggcagggccccttgtgtggatatcaaggcccagcccctttccactggagctgtagcatcagctttgtccttccctgcaggtccaatgaatgctggtgtcactcagaccccaaaattccacgtcctgaagacaggacagagcatgactctgctgtgtgcccaggatatgaaccatgaatacatgtatcggtatcgacaagacccaggcaaggggctgaggctgatttactactcagttgctgctgctctcactgacaaaggagaagttcccaatggctacaatgtctccagatcaaacacagaggatttccccctcaagctggagtcagctgctccctctcagacttctgtttacttctgtgccagcagttactccacagcgctgcaaggctgtctcctctctgcacataaaggcaagggaaggtgctgccctcctcccccacccaagactcaaggatgccctgtgcagagatctctgcaccaggaaccttggaacccagagtggccccaagtggcccggacagtatgagcctcgctctgtgccacgtgcctctgcaggcatctcagccaggcctggactggtcccaggtcctcagatgtctcccttgttgctctctctggtctgtcctccgaggtctcctttcgggttgtggccagggcttccccagctcctacttttctactcatcatcctgagtccgaggcccccagggtggaagaggatttgtatttcagatccatctagactcctgtctcttcctggtgaccatgttgcttcctctctctagggttttcccagcccccaccctcacgtagtctctcctgtggcccacctttcccatctgggcagtcaccctccaaggccttgctgggtctctcctcccctcacttccccgcccctttctactgcagctataaggggagcctctcttctgtgcctccttccttcccatcaaagagatttcaaaggccattccctctgccctaggctagaggctaccttttctactggccagcgcctacctgtgcttcagatctcagcataatctgcccctcctgcaggaagcactcccccgcctcccagctgagatcaactttccactcaaaagctctcatagaatcatgtgtctgttggtaacctttagcacagttgggctttctcaggtacttgtctgataatttttgtactccacccattttttttccctatttttccttttttttttgagacagagtctcgctctgtcaccaggctggaatacagtggcactacctcggctcactgcaacctccgactctccgactctctggttcaagcgattctcctgcctcagcctcccaagtagctgggattacaggcacacaccaccacacccagctaattctttttggtatttttagtacagacagggactcaccatgttggtcaggatggtcccgatctcctgacctcatgatccacctgccaaggcctcccaaagtgctgggattacaggcatgagccactatgcccagactctccaccgaatttttaagcccatgagagctaaggctgtgcctgctgcatttaccaacatcggtgcctggcatgtggggagacccatttcacagagaatggatgagtgaatgacaggctgagtgagtgatgagtgggtggacgaaccaatagtaggaacatgctacacctactgtaacttggcagagatctagcattaagtacaagaaagcccacccctttgatttttgggctcaggttggtcttggaaattgatggggaatcactaccatggcggccacacctggctcaaggcttcctcttgtggctacaacacctgaactcctccaggtctctgtgctctccttcagggtctttccccacaacaaatccagacagatcagggatccacttctagaattccatccataaaggttgttccttgaaaccacctctagtaagaaaatctccattaggtttgcatcaataaaacagagccactacaaatttgacagtgtaaccgatttatgatcagaattagaccttatgcatatgtaggaggagctgagaaagagaaggtctggaggagagaagtcagaaagtgagggagccagtcagtagccagggctcatggagctctggcaggacaggctggagtggcagggacatgacaggatcagagcatgccaggccatgcagtgggaccttgacctgggagcacaggaaaaggccaaggaaatctgtgtctggggaagctgttccctctgtgtgggggccacccatgtacgtgcactgccaaacactgggggcagcctggctgcttttgggaagatgaactgtacacagggtgcagaaggaacaggacttccaaggtctattggatgcctctgtatctgctggccactgactctcactgtctgaccacagttatctgctatgtgtaatagtgactgttttacatctatcttccaaattttacacaaatgtatccttgaccatctctaacccagaatgataacagaaacgtcactctgggaaggcagactcctacctttgcaaagttgacttaacacaatccagcacaggatggattctcccagattaaggcatcagatcacacaactgtctcgacctgccatggtctgtggactcctctccaggggacacctgtgccgcccaggtgaatgtggacacaatttgtatgtagatgttccagacactggtgactaagttttctttaatcgtgtgcctgaactctcactccacccagaggcagggctctgcctcctgcttctgtctccttcctgagcttccgtcctgctggagttgcatggacatcagaaccctggtcagagtgcagcgacctgtggagacagtgggagggaagctcacctcttgctgtcttcctggacctagttcggttatacccaaagcaacttctctggtctccctttggactctgcagtatcagaaatgtgcttcatgaatttgtagctgatcagctcaatgatttgatggccaacccaaagtgaaatcctaagatctgcagaaattgccggcatttctgtgaagatggcaagaatactgtgtgctagagatgccttctctccatgtagagacctggccccaaaacaagacagagcagagagggccaaagagcccaaaacatgtctcagatggttgaagggcaatttcctaggacaatcctgctgacaaaatttcatccctcctattacacgcctgaccacccttctccccagatcagctgagtacccaggatatcacacatcccagcatcttctaacaagggaaaattcttcacatgccagccttcttcctgcaccacattgactaaccctggaaacttcgcctttccagaaaaaagctgtcttctcttggcccagtctagcccagtaggtttaattcatgatttatgtgaccttttaatttactcagaggagaacatatgatttcagagtaaagaatattcattttactttgtataagttggacctaaacagtaaactgagtacttctcttccatcagtgtcttaaattagacaacggtaaaacaaatctttgatgcaagaactttaggtcctggtgtttttcatatggaagatcccagctatccagtccagggcatggaatagatgagcgttaataagtcactctatgcctgagatggttttctattggcatcttttctgagttacagttaacaaaggtgggaaatgatcccagaagaaaggcacgagggcagttcttgagggaatccatgtgataggacagtcattgggcacgtgtgactgggggaatggaggaggctggagcatgaatggggatggcactggggaccctgacttgcaggaaatgcaatgagctcaccactttgtgccctatgttaggggcggtgttggtgcatcctagagtaaatgtccagcagacaaaggagcaagaagcggctgtgggatgacaaggataaactcagagatacagcatgagacctccgggtccagacagctctggagcccaaggcgatgagccatgcattgatgttgttaaaaaggagctgataaatatttaaagcagcacccaactgtgttctaatagaaatgctgtgatcctgaggtcctggggattgagagaggaagtgatgtcactgtgggaactgccctgtggagacaaggacatccctcatcctctgctgctgctcacagtgacactgatctggtaaagccctcatcctgtcctgaccctgccatgggcaccagtctcctatgctgggtggtcctgggtttcctagggacaggtgagtcctcagaacacaaagtagtttcatttttttttctgtgtgtaggcgtgtgggcgtgtgtgtgtgtgtgtgtgtgtgtgtgtgtgtgtgtgtgctgacgacaaatgttttccttattctgttgccaaattctatttccacagatcacacaggtgctggagtctcccagtctcccaggtacaaagtcacaaagaggggacaggatgtagctctcaggtgtgatccaatttcgggtcatgtatccctttattggtaccgacaggccctggggcagggcccagagtttctgacttacttcaattatgaagcccaacaagacaaatcagggctgcccaatgatcggttctctgcagagaggcctgagggatccatctccactctgacgatccagcgcacagagcagcgggactcggccatgtatcgctgtgccagcagcttagccacagtgtggcatagtcgcctccttcctgttcacaaacctcatccttctctctccttgcacctcctagagacccttaacagaggcctctctttgctcctcacttttgatgggaaagaagtagatttggacatcggctgtcctttgggtagaaagagaccacagattcattcctgaaacacagtgactgcaaatgtaggtggtgaaaacaatcacgtcccactgccctctaggagggctcggagccagctcactgctcgaaacagggagtgggtgtcttagccttggccttcagggcagacatgcatcttctataggtcttgggggctgctgtgctgcccacatacatgaggttgtcatgggcaggaaacatgcctctttttcatatgttggggcatctggaaggtctgaggctacatccccagtaacatctttcttctgaagcctcttctatccctgtcaccttggaagtttctgcaacaaaatatcaaacctctcttcctgtttgaagtaaaggtctgtgcaacttttgtggtccttacgtgataaaagcaatcatgataacaataagacttcatttcttctgtctactttaagccaagagtatccttcattttgtttccatttgccattgctgctgttctgatacacacaagcatgcattcaccactgctgccggttcaccttgattcgctcagcaaatctgattattagactctcgagtgttttcattgctgtcaaactcatttgatttgaaataagtttcctgaggccttgaactcaagaggtgttttacttataatattgaatctattcctttttaattttcacattatatattgttatatagtacttgttataaatagaagtacaatgattatattgcagtagaatcttccacctatctgtgggtgatgctgcagtttgtatccatgaaagtgaatgcactggtcagagatcatgtgatcatggatcatgggtttctgagagtcctcagggacaggccatttctccaagtgtggggactcggtgtcccagatgcaaccctgatagaggtgccctgagtctttcatagctaggaggggcatcatagtccttccaaattcactgatcagaaattgtggtggtacagacaccaaatttctttccccagagaatgatggtcactgaggtggagttgctctggacccattttttcttgtgtcatcatcaaatcgcttcttgctcaggtgccctgtgtctcctgggactgagtaaggccagcacacagatgggaattccctgtcttctgagaccttctctctaactgctgccactttcctctccgtgactcctgagacacctggtcctaacagtggacaagctgtgacactgaggctgaacagaacacagtccactgttgtaaatggcgctgcaagaacttgtagcaaaagtgagcagggcttccaatttatactgagaatgaacatgcaacaggagcaaggggcagatgtttctaatgaacaaataggaaggaatagggtttctgctttattgaaatcattctgttgtcttaagtaaagcaggagaaacatttcattgcaattactctaagtcaaaggctagcagctcccaaccaaccagcataactctttgctctgtgatctcggcagcttcagaggactcagaaatcctttctctgcacaaacatccctttgtccattccaagattcaggatcacacactgatcctatcatgaaaacaatgaggtgtgctatagttgctgtggcctcatttttagtgtgttgagcaggaagcattgaagaactttgaaagctttgctcttgagtctagggatgtgctggagccagcttgaatgactcagaagaaccaaataggcatactactcttcccagctcccctttcagtgaagccatgttggctgcttgaagtctgtcatggtgggtatgctggtacaccacaaattgggaaatgctaccagccatgcccccaccttcacagacacccagtatagcagcatatccctggggtattttctgatgtccctgttatgccatttcttgtggggccaaaagggctcagaattcacctcccctctactcctgctctgagaagccatcatctaagtgggcctcaattgtacctatttctattcgacctctaaattctcttgctctgtagctctgtgtctcctacaagcatgccagtctggaacatgacaactattttgaatgtaactaaaggtatcactgaaccagttcattatttgcaaattatctttccttgcatggaatattcagatgctggagtcattgggaacagagatggccaagcagcaactctgggttgtgaaccacatacagccccgctattcttctatgtcaccgacagaccctgaaacaaggactattttgctttggagactaagcagctccccaccagtcaggaatgactctgcttttactttaggctgagaggtcagaaggatcatgccctcagtattctcctctccaagacagagtgtggccactctccatctcagtccctggaagttgtccagagttccctgagaatccctgctctgggacagaatcaccaaggctcatcctcaccagctcccaacaggctccagcagggctttcctgccaggtgcagggcacaggaaatggctctgcctgtctcttagttagagggaggccatgcaatgatgtttgtataagagggactgggattctgggtctccattaaagtatttgataacattttctttgtttttgttttatttggccatctcaccaattaggacagcaatccctttacagttatattgttcttggcacttgggaaggtttttgtggttaagtcacattaagaaattgtgcctttttttcctgttcagatataacccaaggcagtgaaagaaacaacaataattttgaaagcagttacttatgcatcctatgataaaggtgttaagtttcattgcccacatctaactttcagtctagtggaaatgaaaagtcacagttagggggcatgtgagcatgccctgagagaggccgatgccaattgagaagtctgtgccaatccccaatactgtgagattgaaggggagggagagatgacctctctttcagaccatgctcaacaaggagggagagggattttcatccatgggaagctgaggaggagcaaatcccagggtcctctaactcagggtgcgggaacaaatccttggagaggaaaatggtccagttcagctgtcacaggagacaggagaaagcacagtcatctaatccacagtcccctggctgatttgcttccttatgatgctattttgtaccagcatgtcctcatctcccgctgctcctctgcctgtttcagaatcatctcttccgtgtttggtgctcagatcagtggatgtgcattgtacaagctgatcatttcctgtagcagcccctttgctagtcttagctatatccatccttagtttctacattaggtactgctccctccaccattgcttattgccttgtaagaggtttcattttatatatttcaattttactttttattaatagacatttgacttcatcttttgctgatctatacttttggggtaacattgtcattttaggaggatgtgtttgtttatctttagtgattcacattaaataatctctttatacctcaacgtctgtgttttcttactatttaaaaccaaatattattttctttcattcctctccttctattcctctttctttagatggtagtttaagggagaaaaagttaaactataactggagatatttgttaagagtttttcagaatgacggtgggatattaagattttggtaactgaaagcaatagtcagggttagaactagtgttggtatgatgatttagggaagctgctcataacacctgcgggacggcacttgtggaatattctgccggctcactcagcagacacttcccagcggaagaaataatgatgaaacttcacttattggccacaagatggcactatggtccactgggctctggggagtctgggcgagcagtctaggagggaaagggttaagaaaaattagggcttggatcccatattatgcagatgttgcagcagttttcagttattgctaggctacctacagctatgcaagaggcgggaagtccctgtaatctttagtgacatctacagttgaagaatttttgccttcgtatcaggggcgggtgcagaggagcaaatgcctcagaggaacattggaaattgtctgaccaggcaacagctttaacctgcttgagtgatctgggattctgcaagttcataagtcttactgataacatcaccttggctgagattccattggacaccaagtatgtgttctctggagggcaaaaaatattgagaagttctaaaacacctaagtaaacagactactgaaggaaaatgttagtagacacatcaaactgtgctgttagagctgaatataattgactagaagaattatcaaaaatagactataaataagtcactactaaagtatttgtgggcatagaacagtgtttgagtcttctcagggtagattaaggaagaaattcagctattatcctcatgaccttggcttggatgaaaatgcatggactcctcaatttattttcttgtaaaatgttacagaataatattgagcaaacattttatttttctccagcctctatccctctttagcacttacaggtagagcagacacctagacgcaaggttttttagttgggatccattaactgcaggactggagatccacagctgggctttacagggattgcaaaccccacatgcagggaaccccgtgtgtctgcgctgtgcccaactcccctctgtgaggctgccaaaggcggagggccgggtgtcccaggaccccactcacaaagaggggagcaggctgcttgctgggcaaaaaaatcacttcaccaattggccaatctgttgaaagccaaaaagaaatgaaagtctcaattgtgagactgatgaatgcccaatttcccaagttatgaaacggatagcagctcatggttctcagaatgatttcaacagcatatgaagatatttttagagagcttttgtttgtctacagctttccttgatattgatcctcacttgtttttcagcccactcatcacttgagcttattttgtggccaaatttcaatgttgtctatttcagtcactgagcacttctcacattctccaaatcttacacagctatgtgtgttcctgtcttttcttctttttgtgtgattcatttttaaattgggctgtgcagaatacaagcatacatttgtaaatgactcccatcttttatgcaatttagctgtttaatttttagtaatactttttattaaggtataattaatagagagtaaaacacaaatattaatagaaggacatcctggtacattttgacaaatgcatacgccagtgcaatagtaactgaaatgattataaaaaaaatttccgtcactcaagaaagtgtcatcatgctcctttctaatcaatttctatcccagggataaaaacttttctatgtgtatcactgttgagtagctttgtctattcttgagcttcatataatggaatcatatttttattgaattgtttttctccaaaattagtatttctgaagtatattcatatcgttgtatcagtaggtcattcttatgactaatattccattgcataaatatactacaacttgtttatccatgctcctgttgatggatatccatgttactcctgtcttcaactattatgaataaacttgttgtgaacatttttgtggaattcttcctgtggacatatgcattttttttaaagaaatagacttaagagtggaaatactgactcatagtgtagatgtgtgtgctatgcttgcatgtcctcacaaaatctcatgttgaaacttgtcaaggtaatggtattgggaggtgggacagctatgactagggtcatgagggatctgccctcagaaacagatcaatgccctttattgtgggagtgaattaattatcttgggaatggtcttctgataaaaaggatgaattcagtcattttctctgacttcggtgcttgcttccccttccttctgccttggataacagcaggaggccctcagcagttattgcccttctatcttggacttctcagtctccagatctataagccaaataaaactattgtctttataaattgcccattccatggtatttctctatagcagtaggaaagaaattgaaagaaaatatggtacctgagagtgaggctgttgctataatacctgaaaatgtagaagcagctttggttaatgggaagtggctaatggatagaggctgaaagaattgggaggagcagactagcaaaagtctagattcctgaaaacagagcataaagggcaattctggtgaaggctcagggggaaatgaggaacaaggtattgaaaatcgaagtaaatgccatccttgttgtaagtagcaaaaaccttggcaaaattgtgtcctgttctagaactttatggaatataaaaattatgagccatttgctagtatatctgctgaaagaaatatctaagaggcaaagcattcaggctactgtgtgactacttttagccaccaggaaatttaacccagcaagaagggagccatgggaatagattttgcaaaccagcacagatggtgactctacctccctctgctgtcctgtctcccataagccaaactctgtgctgtgagctgttaaagtccaagaattatttctggggaatctgtactcttaataatttacagacaacacaggtctgctttggatctgatcagacagactaaatcttggggactgtaccagtggccactgagaaaaggggctcggaatgttgtcttggatagaaaaatataataagaaacattggtgtgaatctagcatcagaaagatgacgtgaggacagcaaggaagagctggaaactgaggtttactcacaggctcctcaccctccgctgatgggcaggtgtgtgagctccagcatggagcaccacagcactaggtgggagaacggtgatagggtgatggggcagcctgtgagctggggcagtgtaggcagaggaggaactgtatcaccacagaaacttctgccttcacacatccctccagctaggcaggacaggtagagagtccagtgtcctggagcactagacctaaggaaggctgcatggggaggacaaaggacagtgacatcacaggatacccctcccatcaggaaaatcaaggcccagaactcactcggctcttccccaggagaaccaagccctgaatcagatgcagtgcttcctgtccctctgtgccatgggccccgggctcctctgctgggcactgctttgtctcctgggagcaggtgagtcctgggcacaggacagcagccccattctcagctttcccacccctgtgtcctccactttaccttggggaggacctccaggctgtccctgtgctcatcctccatctgcttttcccacaggcttagtggacgctggagtcacccaaagtcccacacacctgatcaaaacgagaggacagcaagtgactctgagatgctctcctaagtctgggcatgacactgtgtcctggtaccaacaggccctgggtcaggggccccagtttatctttcagtattatgaggaggaagagagacagagaggcaacttccctgatcgattctcaggtcaccagttccctaactatagctctgagctgaatgtgaacgccttgttgctgggggactcggccctctatctctgtgccagcagcttggcacagcccatcagagtcactgacgttctgtatataaacttcctgccttagctttgccttgagagctgcaggccccacccagatttcactccttcaagggaagcttttagttgtttggaaggcatgtcttgtgtcctactgagggcagagctctcccaaccaataaagcccaagtttcctgtgtcctgagtgtgcccacttctgtgctgcatcttcttgcagcttgtcacctcagtacaagagtgactgctgagccccagatgtgtgcttgattatttgcatttcttacatagcttaatgcctttcaacaatcttgcacatcaaacattcttattcttcctttacagatagaaggctcagggacattgagtcattttccccaatgtctcttggcttgtaaggatcagaagtaggaaacaaactagtccatccattttccacctacccccctgctccatcatcatcttctgcatcctggtcagtaaatcagagccctcacactgccgtctagtgaccagcagggccgcagtagaggctgaaatgtcttcaggggtcattactatgtccttttcattagctcctttgaggaatgttaaatttcacacattttaacaatcatttatatgcattccctttgtctttccccagtctgcagcttatattttcatttttatggagtttttggtgcacaagagcttaatttaatgcaacaaaaactaaaaacaattttgtttgtgtgtagacaaaaaccactttttcatataaatgtctaagcatatttttctcaacttattctactaaaatttaagtttggattttcaccactaagaataaatgtacctgaaatacatctcatgtaagaaataagatacagacctaggaatgggagggaaggacatatattcagtgaagaaacaatagcttgtcaaaaagagccctaagtggacacctggagctgacggtggagaggtaggtggagggcaaatgagcatgaactttgtcagtctattgtcttgtagaagaaagacagccaggagcagagaccatatgggtgaaggtttatgacttgactgtaggttgaaggttgcagcaggtagagggagaattgcaggcagagggcagagtcactggctggcaggggcagtggcatcatcagttgactctactgacatctaggatttatgtccccaacacacaagctgaaaaacctccccacaatttccccatttttccctgaccctaccatgaccaccagactcctcagtggtgtggccttttgcctacttggggcaggtaagatctttaaagccttttccttggctcaccacatcccagcttaagcctttacctcaggtctccattattggggtccctccttgggcactcatcttccttctatcataaacctcacagaagctgggacaatcaaatccttaagataccagagaacaaaggcagtacatgaagtggcacggagatgcctgagactgtcatccatgactacatgtgtaggtgttaataggagctgaacctggtgtacagctgatctgtcccagcccgcaatacagagaaatccctgagggtctgtgactttctctcaaagccaaatatgtggcctttgtgtcagcctctcccagacctctgtgccctcttgcaccagcagtcaccccacagccaccttcctctgcacacaatgttcagtggaagatataggtggccttgtcttcacgagaccatgttctaggcagtggaagacgttttcccataggagtctccccaacactgcccaggctggggccctcagatttctgagcatccctgtgcatgggaaactctgccctgtgttgagcttctctcccaggccagtctcagctggacgagggaacgcacatcacagtgatgtgagcagttgccgcctctctcccaggcccctcctccagctctggcctcagaagtcctcttcttcacttgctctcagaaaggaaagttcatttgaaattgtatatttgcagacagcattgacaacttttccccgtcggccttcacaactccatcttccccacaccatgctcatgtcagtcctcagcctcctccacatgatgtctgctcccagctgtcctctccctctgcaccttcacctccacgtcaaccacagatgcctcagttcaggacattcctcatgcatcatgctcctcccaccaaaggcctttccactccatgctgtattctctgtgtcaacacaagtctcttcttctttgttcttgctccaactgtcagtttatctacaaccatctctagggagacactccttcaacagttttcctaggctgcacctccttattgtaaatgctcacagcttataatatgtattaaaattcatagatttagcaccatagtcattttccatgactttgtgtgactatttaattgacactactcttgcattctagactgtaacatgcatcattttacaaattgtggatgttttgttccccattttattgtcaggaccaacagcagttccaatcttgaaactggccaatcttgaaaaatgaagagcagatattgaaaggccgtctgagtacccacttagatgtctggacgcattaaatcggaacctctatcccttcatctcctaggatcaaatgagtcctggaaacagatgagaaatccctgtcatggataagtaactggatccaagcctttctgcacgactgaatttcctatctgccctatcgccttcctgcctaatctcctccttcaatctccttccctcacaggtgtcctggatttgggagtctcacagacacagcgcacctaatcactctgagagagtgatcagaaacataatgtcaaacactgacattaaaaggtcatggagaagaaaacaaatggcttccccatgctcttatggagagttttcccaaggcacaaatatctctttgggtggctttgaggtcatggtgcctgacacactgagcgatattatgggtgtccatttccatgaattggtgggcaatgtcagagacacagagttcatggtcaccagcttcctccagcccacacctgattttggtgcagggcgctgagcagagacctttgcttgttaccctcctttgccagttaggaaaggctgattgagaggcagaggctccatttacagagcagggctatgtgttagtccctgaagaattgtgagagccattctgggtggaaataatcaaatatacaatccccaagaatggcccacggatagacagaagtcccaattttgccagaatgatttgcatctatgctttgaagacaaatgcagttttatctctttaggcaataaagaccaaaaatagactagttattttaaataattgaaccttaaacagaccaaagtcagaacatcttccctagggacagcattttcttccacccactcactaaagctgtatttgagaaagcagtgtgctgttgataaacgctggaatatcgttacaatcgacattgtaataatactgctacttggatcagaaacaaagagcatttctaaagcttgaacaatgtaaaactggaaacgagctctcactgagtttggaaatgcaggcactagagggtgctcatttctcttccttttccaatcgggggctattcaaaggctgttctagaacaaggggtgagatcctccacttccccgtggtgatcaggctttcacaggtagaagccttattagttcataatcagccaagctgacctcaccatcaaatgtatcgacctcgatgctcaccctcctcagcagtcagagactggctgtgttcaccaggagctcgtgtgtttttacggagcacactttctcctcggtttattaaaaacaaatgagcctttatacggggttccataaacagaagctttctgtactttgcccatttagacactgcaaattctgatgcctgatgaaaagtgtaaacttaaagcttgcatgtcgttaagattttttaataaccaatttaaataatatatataatgaaaatgtcaataatgctctcgaatccaatcccatgttccattggtaaccaatattaacgctctggtgtgcttcttttcacccctcttttctgtgttcatgcacacctttctacccaagtacacctacagaaaatgggttcacctgtacactttaactgccaaatgtgtactcttttctgtatatcttggtctttattgttccagattggttgatatagatctaacttgctcctattatctgcttcatattgcataatgagggtagacaggtacattcatgctgtattgtctgtttcctaaattctgccagatcttttctaaagtgaccaaatggcatctttacgcttccaggttctcctcaccccagcacccagttgatgattccagcttttccatcactcatagtcctggcaggtctgagagctccatttggtttctcctgcatgaggagacagggagggataaaaggatagacctttatcaaacctaccagagactacatggtatctcagttcatcctcataaagcattgaggggaatgctagtcttgttttatagatgagtctagatgaggctagagtccaggaaatcaataaatagccttgcccatggtctcagagctaataaatggtggaggcagatgaagggcagtcggcttgcttccatgtggaattgatagaggggtcactggagtttgagggaggggaagtctagaaccatctggcgttgtcttcagatcggacaccagggttgagacagtctgtgtaccctatagcaccgcaggtacaagcatcatggtgttggcagtggggagatactagagtgggtaagtgattagtggcctggaactggaagatctgagctttgacaaaattattcccatcacaacatgtagcagagacactgatgtggataaactaggtcagggagctgtgtgaggagctgttgttaaaataagggagggaggagaagcaactaagtggtcacttcctaacatgaaatgtagaggaaaccaatattaactagaatccatctgattttagtcagttttcctttgtaagtatttggaaggtgggataatttattttcaaggttaagtaaacatctatacatctcctttatcttttgaagactggtggcgaagcgaaaaatggcacggccaatggagtcagagtttgtttaataaatatctcagagttcaaagagagactctcatgggccagaaattggtaaatgttcctgcattctaaaattaggaggatcttattttctttgaatcaacagagaaggaagcacaggcagtggggaggaacagttgggaacacggcagagtggccgcaggatgtcaaagacaaaggacatgtaatatcaaattctaagctgtgaagctgtgatgcaaccctccaccttctcctaatggattttttaggtctcagcgcagatgcacagctgagggagtaatttctttggaaatgaaggacaaatagctgtgttaaatattaataacaagtccacattacaaagcacgcctggaaatggaaacaagattatttctaaggccttttctactctaagagtctctaacttggtggcaaggtgagaggtgaggttggggtgggtgttgatccacacgcgatgagtaccatgaggctctaccatgaagcatgtagttctcagtgtgaatcagagccctaagaagaataatgccctttactttgttttgtcctgtgccatcccaaacccactccacccataattaagcagccatggaaatgagggtagccagaaggaatcaaaccctgctgcttggttcagtagacacagggacctgggaggagggtgttggctgggtcaaggagaagatgatgagctcagaaaatagacaaggagaaaccccagtggaaagcttgtaaaactctggatgaatcacaagatatgttattagagctcctttttattactaaattttatttattactaaattaatggcaggaaccctgcacaaagggatattccctatgaaagatggcatctcaaataaaaacagagcattcttccttaccctaaagtctgccctttctccccaagtccctcatgcatcaggccacctttgtgcccacagatcatgggcagcgctgggtggccatcatcatccacacagagagggcagtcagcagcatgagctggttctgcctgatatggtctcaccctaggcatggaaagcaagagacctgcgttgagctgaaggtgctcagctgggtttgtcaggagtcccatctgtcagtgaattgacaagaaacagagcaaaacgactcctgcaatgttgagaagcctgcacctaggatctggaaacttgataacagagaaaaccaatatagacaaaggattttaaacaggattatggtcaattaagcaaattagaaaaggatacttgaaggagtatttgggatacaggaatcaaaaacaccaggaagacatgagaagtttccctaagagtctagactacagcactgtgtagataactaacatcagaatattaattatattattgaagaattaaaatttacattgaattacaaactctttacaaaaggtcatgaaaatcttgtagacttgtttcaattcagacaaatgtgttcttctcattctcagctgttcactggtgcatttatcttgaatttgaccatctggggaatggcgtggcctctcctgactggaaggctctggggcccaggcagggagaatgatgtctcagaatgactcccttgagagtcctgttccccttttatcaatgcacagacccagaagacccctccgtcctgcagcccctgccatgagcctcgggctcctgtgctgtgcggccttttctctcctgtgggcaggtgggtcctgggcagggcccttgcgtggatttcaaggcccatcccctttccactggggctgcagcatcagttttgttcttctctgcaggtcccgtgaatgctggtgtcactcagaccccaaaattccacatcctgaagacaggacagagcatgacactgcagtgtgcccaggatatgaaccatggatacatgtcctggtatcgacaagacccaggcatggggctgagactgatttactactcagctgctgctggtactactgacaaagaagtccccaatggctacaatgtctctagattaaacacagaggatttcccactcaggctggtgtcggctgctccctcccagacatctgtgtacttgtgtgccagcagttactccacagcgctacaaggttgtctcctctctgcacataaaggcagggaggctctgccctccaccccgacctgagactcagggatgacctgggcagagtattctgcaacgggaaccttggaacccgaagtggccccaagtggcccagacagtatgagcctcgctctgtgccaggtgcctctgtaggcatctcagccaggcctggactggtcccaggtcctcatatgtctcctttgttgctctctcctacaagctctacttttggggttggggccagggcttccccagctcctacttttctactcatcatcctgagtccaaggcccccaggatgaaacaggatttgtatttcagatccatctagactcctgtctctccctggtgaccatgttgcttcctctctagggtttcccccagcccccaccctcctgtggcccacctttcccacctccgcagtcatcctccaccccccacttccctgcccctctctactgcagccatgaggggagcacctctctgtgactccttccttcccgtcacagagacttcaaaggccattttctttgccctgggccagagccttcctttctctagtggccagctccttcctgtgcttcagatctcagtatgatcagcccctctgcgggaagcactccctcccctcccaggtaagatcaactttcctctcataagctctcaatgaatcatatgtctgttagcaacctttagcacagttgggctttctcagatgcttgtctgattatttttgtgctccacccaatttttttttttttaagacacagtctcactccgtcaccaggctggagtgcagtggcatgatctctgctcactgcaacctctgatactctgattcaagtgattctcctgcctcagcctcccgagtagctgggattacagacatgtgccaccacgcccagctaattcttgtttgtatttttagtagagatggggttttaccatgttggccaggatggtctcgatctcctggcctcatgatctgcccttctcggcctcccaaagtgtggggatacaggcgttagcagcacgcctggcctctccacccaatttttaagcccatgggagctaagactgtgcctgctgtatttaccaacatcggtgcctggcatgtggggagacccatttcacagagaatagatgagtgaatgacaggctgagtgagtgatgagtgggtggacgaacaaatagcaggaacacgctacatctactgtaacctgccagagatctagcattaagtacaagaaagcccacctctttgattgctgggctcaggtcggtcttggaaattgatggggaatcactatcatggcggccacacctggttcaaggcttcctcttgtggctgcagcacctgacctcctccaggtctctgtgctctccttcaggatctttccccacaacaaatctagacagatcagagatccacttcaagaattccatccttaaaggttgttccttgaaaccacttctggtaagaaaatctccattaggtttgcatcaataaaacagagccactacaggtttgtgagtgtaaaagatttatgatcagaattagactttatgcatatgtgggaggagctgaggaagacaaggtcttgaggagagaagtcagaaggtgagggagccagtcagtagccagggctcctggagctcgggcaggacaggctggagtggcagggacatgagaggatcagagcatgccaggccatgcagtgggaccttgagccgggagcacaggaaaaggccgaggaaacctgcttctggggaagctgttccctctgtgtgggggccatgctgcgggtatagtgccaaacactgggggcagcctggctgctgttgggcagcatttggcaagatgaactggacacagggtgcagaaggaacaggacttcctaggtctgttggatgcctctgtatctgctggtcactgactctcactctctcaccacaatgacctgccaattgttatagtgactgttttgtatctgtcttctaaatgttacaaaatgtatccttgaccatctctaacccagaatgataaatggcattctgggaaagtcagactcttacatttgcaaagttgacttaacacaatccagcacagtatggattctcccagattaaggcatcagatcacacaactgactcaacctgccacggtccgtggactcctctccgggggacacctgtgctgcccaagtgaatgtggacacaatttgtatgtagatgttccagacactggctactaaattttcttttaatcctgtgcctgaaatctcgctccacccagaggcagggctctgcctcctgcttctgtctccttcctgagcttctatcctgatggagttggatggacatcagacgcctggtcagagtgcagtgacctgtggagacagtaggagggaagctcacatcttgctgccttcctccatccagttcttttataaccaaagcaagtgttctggtctcccttttgactgtgcagtatgagaaatgtgcttcatgaatttgtagctgatcagctcaatgatttgatggccaacctaaagtgaaatcctcagatctgcagaaattgccctgcatttctgtgaagatggcaagaatacagtgtgctagagttgccttctctccaagtagagacctggcccccaaacaggatggagcagagggggccaaagagcccaaaacatgtctcagattgttgaaaggcaatttcccaggacaatcctactgatgacatttcatcccttgtattacacacttggccacccttccccccagatcagctgagtacccaggatatcacacatcccagcatcttctaacgaggaaaaatacttcacgtaccagcctccttcctgcaccacattgactaaccctggaaacttagcctttccagaaaaaagctctgtcttctcttggcccagtctagcctggtaggtttaattcatgatttatgtgaccttttaatttactcaaaggagaacgtatgatttcagggtaaagaatattcattttatttttataagttggacctaaacagtaaactgagtacttttcttccatcagcgtcttaaattagacaacggtaaaacaaatctttgatgctagaacttcagatcctagtgtttttcacatggaagttcccagttacccagtctagggcatggaatagatgagcattaataagtcactgtatgcctgagatggttttctatgggcatcttttctgaattacggttaacaagggtgggaaatgatcccagaagaaaggcatgagggcagttcttgagggaacccatgtgatgggacagtctcattgggcacgtgtgactgggggaatggaggaagctggggcatgattgggatggcacaggggaccctgacttgcgggaaagacaatgagctcaaccctttgtgcccctatgttaggggcgctgttgttgcatcctacaggacatgcccagcaggcaggggagcggctgtaggatgagaagatgaactcagagatgcagtgtgaggtctccaggcacagacggctctggagcacaaaccaatgagccatgaattgatgttgttaaaacggaggttataaatatttaaagtgtcacccaagtgtgttctaatagaaatgctgtgaccctgaggtcctgaggattgagagaggaagtgatgtcactgtgggaactgccctgtggagacaaggacatccctcatcctccgctcctgctcacagtgacactgatctggtaaagcccccatcctggtctgacactgtcatgggtaccagtctcctatgctgggtggtcctgggtttcctagggacaggtgagtcctcaaaacacaaagtagtttcatattttttctgtatgtaggtgtgtgtgtgtatgcatgtgtgtctgtgtgtgtgtgtgtgtgtgtgtgtgtgtgtgagatgactacaaatgttttccttattctgttgccagattctgtttccacagatcacacaggtgctggagtctcccagtctcccaggtacaaagtcacaaagaggggacaggatgtaactctcaggtgtgatccaatttcgagtcatgcaaccctttattggtatcaacaggccctggggcagggcccagagtttctgacttacttcaattatgaagctcaaccagacaaatcagggctgcccagtgatcggttctctgcagagaggcctgagggatccatctccactctgacgattcagcgcacagagcagcgggactcagccatgtatcgctgtgccagcagcttagccacagcatggcacagtcgcctccttcctgttcacaaacctcatccttctctctctttgcagctcccagagatcattaacagaggcctctctttgctcctcacttttcctgggaaagaggtagatttggacctcggttgtcctttgggtggaaagagaccacagattcattcctgaaacacagtgactgcaaatgtaagtggtgaaaacaatcacgtcccactgcactctaggagggctcggagccagctcactgctccaaacaaggagtgggtgtcttagccttggccttcagagcagacatgcatcttctataggtcttggaggctgctgtgttgcccacatacatgaggttgtcataggcaggaaacatgcctcttcttcatatgttggggcatctggaaggtctgaggctacatccccgagaagatctttcttctgaagcctcttctatccctgtcaccttggaagttttctgccacaaaatatcaaacctctcttcctgtttgaagtaaaggtctttgcaaatttgtggtccttacttgataaatacaatcatggtaacaataacacttcatttcttctgcctactttaagccaagagtatcctttattttatttccatttgccattgctgctgtcctgatagacagaagcatgcatcaccaccgctgccacttcaccttgattcactcaggaaatctgattttcagactctgagtgttttgattgttgtccaactcatttgatttgaaataattctcccaaggcctttaactcaaaaagtgttttatttataatattgaatctattcctttttattatattttttcataatatatagtgttatatagcacttgttagaaatagaagtacaatgattatattgcaatagaatcttccatctgtctgtgggtgatgctgcagtttgtatctatgaaatggaatgcactggtcagagctgatgtgattatgcattatgggtttcggggagtcctcagcgacagaccacttctccaagtctgggactcagtgtcccagatgcaaccctgatagaggtgccctgaatctttcatagctaggaggggcatcatagtccttccaaattcactgatcagaaattatggtgtggtacagacaccaaatttctttccccagagaatgatggtcactggcagggaattgctcttgacccattttttcttgtgtcgtcatcaaatgactccttgctcagccgccctgtgtcttctgggactgagtaaggccagcacacagatgggaattccctgtcttctgagaccttctaactgctgccactttcctccatgtgactgctgagacaactggtcctaacagtggacaagctctgacactgaggctgaacagaccacagtccactgttgtaaatggtgctgcaagaacatgtaacaaaagtgagcagggcttccaatttatagagagaatgaacatgcaagaggagcaaagggtagatggtactaacgaacaaatagggaggaatgtggtttctgttctaatgaaatcattctgttgtcttaagttaagcaggagaaacatttcattgcaattacttcaagtcaaaggctagcggctccccaaccagccagcataactctttgctctgtgatctcagcagcttcagaggactcagaaatcctttctctgcacaaacatcccgttgtccattccaagacccaggatcacacactctgatcttatcatgaaaataatgaggtatgctatagttgctgtggcctcattttagtatgtttagtaggaagcattgaagaagtttgaagcttttctctttagtctatggcttgtatgactcaaaagaagtaaataggcatacttttcccagctccctgttcagtgaagccatgctgggagcttgaaatctgccatggtgggtatgttggtacacagaaattaggaaatgctaccagccatgcccccaccttcacagacacacagtttatcagcacattactggggtattttctgatgtccctcttatgccatttctgagctaggccaatatagctcagaatttatttccccactactcttgttcttagaacccatcacctaaggggccgtcaattgttcctatttccattcaactcccaaattctcttgcactgtagctctgtgtttccttcaagaatgccagtctggaacatgacaactattttgaatgtacctaaaggtatcactgaaccagttcattatttacaaattatctttcctcacatggaatattcagatgctggagtcattgggaacagagatggccaagcagcaactctgggttgtgaaccacatagagccccgctattcttctatgtcactgacagaccctgaaacaaggactattttgctttagaaactaagcagctccacaccagtcaggaatgactctgcttttactttaggctgagagatcagaaggatcacatcctcagtattctcctctcctggactgagtgtggccactctccatctcagtccctggaagttgtccagagttccctgagaatccctgctctggggcagaatcaccaaggctcatcctcaccagctccccacaggctccagcagggctttcctgccaggtgtagggcacaggaatggctctgtctgtctctcaggtagagggaggccaaacagtgatgtttgtataagagggactgggtttctgtgtctccattaaagtatttgacaatattttctttgttttttttttttttttggtttatttttccatctcgccaatgaggagagcaatcccttggtagttatattgtttttggcacttgggaaggtttttgtggttaagtcacattaagaaattgtgcctttttttcctgttcagctgtaacccaaggcagtgaaagaaacagcaataattttgaaagcagttacttgtgtatcttatgataaaggtgttaagtttcattgcccacatctaactttcagtctagtggaaatgaaaaggcacagttagggggcatgtgagcatgccatgagagaggtcaatgccaattgagaagtctgtgccaatccccagtactgtgggattgaaggggagggagagatgacctctccttcagaccatggtcaacaaggaaggagagggagttcatccatgggaacctgaaaagcagcaaatcccaggggcatctaacttcaggtgcaggagcaaatccttggagaggaaaatggtccagttcagctgtcacgggagacaggagaaagcaaagtcatctaatccacagtcccctggctgatttgcttccttatgatactattttgcatcagcgtgtcctcatctcccgctgctcctctgcctcttccagtgtcatctcttccctgtttgctgctcagatcagtggatgtgcattgtacaaggtgatcatttcctatagcagtccctttgctactcttagttatatccatccttattttctgcattaggtactgctccctccaccattgcttattgtcttgtaacaggtctcgttttatatatttcaattttactttttattaatagacatttgacttcatcttttgctgatctatacttttggggtaacattgtcatttttggaggatgtttttgtttatctttagtgattcagattaaataatctctttatacttcaacgtctgtgtcttcttactatttaaaaccaaatattatttcctttcattcctctcattctgttcctctttctttagatggtagttttaagggagaaaaagtttggctataactgaagctatgtgataagagttattcagaatgagggtgggatatcaagattggtaactcaaagcaataattagggttagaactaatgtaggacttagggtttagggaagctgctcataaaactgcgggatggcacctctggaatattctggcagctcactctgcagacacttcccagcattccttgggccattacagaattaaacaatgatgaagcttcacttattggccacaagatggcagtgtggtccactgcgaatgtaaagggctctgggcagtctgggggagcagcctaggagggaaaaggttaagaaaaattagggtttgtattcaatattatgcagatgttgcaggagttttcagttattgctaggctacctacagctatgcaagaggcaggaagtccctctaatctttaatcagatctacagttgaagaattttggccaggcagccttggtgtcggggcatgtgcagacagaggagcaactgcctcagaggaaaagggaaaagtgagaggcaggctgtgccctgagcccagtgggtctctgctgcacctcatcttccctgcaggtctggccaggcaacagctttaacctgcttgagtgatctgggattctccaagttcataagtcttactgataacatcaacttggctgaggttccattggaaatcaagcacatgttctctggaggacaaaaagtattgacaaaaatttctgaaacacctcagtaaacaaactattgaaggaaaatattagtagatgcaccaaactgtgccgttagagatgaagataatagactagtagaattttacaaaggagactataaataagtctctactaagtatttgtgggcatcaagcagtgtctgagtcctctcagggtagattaaggaaggaattcagctattatcatgactttggcttggatgaaaatccatgaagtcctcaattgattttcttgtaaaatattacagaataatattgagcaaacattttatttttctccagcctgtatccctctttagcactaacaggtaaagcagacacctagaggcacggtttctttagttgggatccattaactgtaggactgggaggtccatagctgggcttcacagggagttcaaaccccacgtgcagggaactccgtgtgtctgtgctgtgcccaactcccgtctgtgaggctgaaaagggggagtgccgggtctcccagtaccccactcacaaagtggggagcaggctgcttgctgggcaaaaaaatcaattcaaaaattggccaatctgttcaaagccaaaatgaaaggaaagtctgaattgtgagactgatgaatgcccaatttcccaagttatgaaatttgtagcagctcatggttctcagaatgatttcaatagcatatgaagatattgtaaaaagcttttgtttgtctacagctttccttgattttgatcctagttgtttttcggcccactcatcagttgagcttattttgatgccaaatttcaatgttgccacttcagtcaccaagcacttctcacattctccataacttacacagatatgtgtgttcctgtcttttcttatttttgtgtgattcatttttaaattgggctgtgcagaatacaagcatacatttgtaagtgaatcccatattttatgatttagctgtttactttttagtaatactttttattaaagtataatagagagtaaaacagaaatattaatacaaggacatcctggtacattttgacaaatgcatatgccagtgcaatagtaactgaaatgattataaaaaaaattctgtcatgcaggaaagtgtcgtcatgctcctttccaatcaatttctatcccagagataaaaattgtatttatttatttatttagagacaagagtctcactctgtcacccaggctggagtgcagtggtgtgatctcagctcactgcaagctctgcctccccggttcacgccactctcctgcctcagcctttggagtagatgggactatagatgcttgccaccacacccggctaattgtttgtatttttagcagagacggggtttcatcgtgttagtcaggatggtctcgatctcctgaccttgaaatctgcccgcctcagcctcccaaatttttgggattacaggcatgagccaccgcgcctggccaaaacttttcttatttttatcaccactgactagcttggtctattcttgaactccatataaatggaatcatataacattttattgagttattttcctccaaaattagtatttctgaagtttattcatattgttgtatcagtaggtcattttttcttatgactaatattccattgcataactataccacaacttgtttatccatgctcccgttgatggatatccacattactcctgtcttcaactattatgaatacagttgttgtgaacattcttgtggaactctttcttgtggacatatacattctttttttttattttattttaggtataaacttaagagtggaaatactgacttacagtgtagatgtgtgtgctatgcttgcgtgtcctcacaaaagctcatgttgaaatttgtcattgtaatggtattgggaggtgggacagctatgactaggtcatgagggatctgccctcagaaagagatcaatgccgttattgtgggagtgaattagttgtcttgggaatggtcttctgataaaaagtataaattcagccactttctctgtcttgggtgcttgcttccccttccttctgccttggataacagcaggaggccctcagccgctatggcccattgatcttggacttcccagtctccagatctataagccaaataaatgccttgtctttataaattacccagtctgtggtatttctctatagcagtaggaaataaatggaaagaaaacatggtgctgagagtgacgctgttgctgtaacaagtacctgaaaatgtagaaacagctttagttaatgggaaatggctaatggatagaggttggaagaattcagagaagcagactagcaaaagcctagattgctgaaaacagagcattaagggcatttctggtgaaagctcagggggaaatgaggaacaaggtatcagaaattgaagtaaatgccatccttctcataagtagcaaaaaccttggcaacattgtgtcctgttctaggactttatggaatataaaattatgagccattagctaggatatctgctgaaagaaatatctaagctgcaaagcattcaggccactgtgtgactacttttaggcaccaggcaatttaacccagcaagaaggcagccaagggaatagattttgcaaaccagcacagatggtgacactacctccctctgctgtcctgtctcccataagccaaactcactctgaagttagagaaaagaggagacagttaacatgatacactggagtcagcctgtgaaggcagggtggatctggagggattaacataaactttccagagcactacatataggatggccttgagggtgttgagtccaaagctggctaggtctgtggtgtgagctgataaggccctagatttatttctggggaatctgcactcttaataatttacagacaacacaggtctgctttggatctgatcagatggactaaatcttggggcctctgtaccgctggccactcaggaaatgggttgggaatgttgcctgggacaggaaaatatagtaagaaaccttggtgtgaatctagcttcagaaagatgatgtgaggagagcaaggaagagctggaaactgatggtttaatcacaggctcctcaccatctgctgataggcaggtgtgcgagctccagcatggagcaccgcagcactaggtcagaggagggtgatagggtgatggggcagcctgtgagctggggcagttaggcagaggagcaactgtatcaccacagaagcttctgccttcacccatccctccagctcggcaggacaggtagagagtccagtgtccgtggagcactagacctaaggaaggctgcatagggaagacacaagacagtgacatcacagcatacccctcccatcaggaaaatcaaggcccagaactcactcagctctttcccaggaggaccaagccctgaatcaggtgcagtgctgcctgccccactgtgccatgggccccgggctcctctgctgggtgctgctttgtcccctaggagaaggtgagtcccgggcacaggacagctgctccattctcagctttcccacccctgtgtcctccactttaccttggggaggacctccaggctgtctccagtgctcattatacatctgcttttcccacaggcccagtggacgctggagtcacccaaagtcccacacacctgatcaaaacgagaggacagcacgtgactctgagatgctctcctatctctgggcacaccagtgtgtcctcgtaccaacaggccctgggtcaggggccccagtttatctttcagtattatgagaaagaagagagaggaagaggaaacttccctgatcaattctcaggtcaccagttccctaactatagctctgagctgaatgtgaacgccttgttgctaggggactcggccctctatctctgtgccagcagcttggcacagcccagcagagtcactgacattctgtatataaacttccgccttagctttgacttgagaactgcaggccccacccaggtttcactccttcaagggaagcttttagttgtttggaaggcatgtcttgtgtcctactgagggcagacctttcccaaccaatagagcccaggtttcctgtgccctgagtgtgcctgcttctgtgctgcaacttcttgtagtttgtcacttcctggataacttcagtagaagagtgactgttgagccccagatacgtgctagattcttcgtatttgttacatagcttaagggctttccacactcttgcacatcaaacatttctattcttcctttatagatagaaggctcagggacattgagtcattttccccagtgtctcttggcttgtaaggatcagaagtaggaaacaaactagtccatccattttccacctacccccctgctccatcatcaccttctgcatcctggtcagtaagtcagagccctcgcactgccctctagtgaccagcagggctgcagtagacgctcagatgccttcaggggtcattactatggcctcttcattagcaactttgaggaatgttaaatttaacactttttaaaaatcatttatatgcattccctttgtctttccccagtctgcagcttatgttttcacttttatggtgtttttttgatgcacaagagtttaatttaatgcaacaaaaactaaaatcaattttgtttgtgtgtagacaaaaaccgctttcttatataaatgtctaagcgtagttttatcaatttattctagtaaaatttaagcttggattttcaccactaagaataaatgtacctgaagtatatcttatgtaagaaataagatagagacctaggaatgggagggaaggacatatgttcagtgaagaagtaatagcctgtcaaagagagccctaaagtagacccccagagctgatggtggagaggtaagtggagggcaaatgatcatgaaccttgtccgtttgttaccttgtagaagaaaggcagccaggagtggagaccacatgggtgaaggtttatgacttgactgtaggttgaaggtggcagcaggtagagggaggactagcaggcagagggcagagtcactggctggcaggggcagtggcatcatcagttgactctactgacatccaggaattatgttcccaatgcgcaagttgaaaaactccccacaatttgcctattattccttgaccctgccatgaccaccagactcctcaatggtttggccgtctgccccctgagggcaggtgagtcccctaaagccttttccttggctcaccacatcccagcctaagcctttacctcaagtctacattattggggtccctctttgggcactcaacttccttctatcatagacttcacagaagctgggacaaccagatcccaagataccagagaacaaaggcaggacgtgaagtgacatggagatgcctgagactgccatccatgactacatgtgtaggtgttaataggagccaaggctggtgcacagctgatccgtcccagcacacactatacagaatccctgagggtctgtgactttttctcaaagccaaatatgtggccttggtgtcagacagcctctcccagacctctgtgcccccttgcaccagctttcaccccacagccaccttcctctgcacacaaagctcagtggtagatatagttggccttgtcttcatgagattttgatccaggcagtggaagacattgtcccataggagtttccccaacactgcccaggctgggactctcagatttctgagcagccctgtgcaagggaaactctgccctgtgctgagcttctctcccagggcagtctcagctggacaagggaatgcacatcacggtgatgtgagcagatgcagcctctcttccaggctcctcctccagctctggcctcagaagtcctcttcctcagttgctctcagaaaggaaagttgatttcaaaattgtatatttgcagacagcactgacaacacaggtctatgttcttttccctgtcagccttcacaactctatcttccccacaccatgctcatgtcagtcctcagcctcctccaagtgatgtctgctcctagctatcctctcatcactctgcaccctcacctccatgtcaaccacagacgcctgagttcaggccattcctcatgcatcatgctcctcccaccaaaggcctttgcactccacactgtattctctgtatcaacacgagtctcttctttttgttctttctccaaatctcagtttaactaccaccatctctagggagacactccttcaacagttttcctaggctgcacctccctattgtaaatgctcacagcttataatatgcattaatattcatagttttagcaccatagtcatttccctgactttgtgtggctatttcacacttctcttgcattctagactgtaaaatgcatcattgtagaaattgtggatgttttgttccccattttattgtcagtaccaacagcggttccaggtgccagtgaccagtcttgaaagaataaagaagagatattgaaaggccctctgagttcccacagactattccagaagtctggatgcattaaatgggaacctctatcccttcatctcctaggattaaatgagtcctggaaacagatgagaaatccctgtcatgcatgagtaactggatcccaagcctttctgcacgactgaacttcctcactgcccatcgccctcctggcttgtctcctccttcaatctccttccctcacaggtgtcctggatttgggagtctcacagacacagggcacctaatcactctgagagagtgatcagaaacataatgtcaaacactggcattaaaaggtgatggagaagaaaacaaatgccttccccattctcttaggcaaagttttcccaaggcacaaatatctttttgggtggctttgaggccatggtgcctgacacactgagctatattatgggtgttcatttccatgaattggtgggcaatgccagagacacagacctcatggtcaccagcttcctccagcccacacctgattttggtgcagggcgctgaacagagacctttgcttgttaccctcctttgccagttaggaaaggctgattgtgaggcagaggctccatttacagagcagggctatgtgttagtccctgaagaattgtgagagccattctgggtggaaataatcaaatatataatcaccaaggatggcccacggatagacagaagccccaattttgccagaatgatttgcatctatgctttaaagacaaatgcagttttatctctttaggcaataaagaccaaaaatagactagctattttaaataattgaaccttaaacagaccaaagtcagaacatcttccctagggacagcattttcttccacccactcactaaagctgtatttgagaaagctgtgtgctgttgataaacactgcaatatcgttacaatcgacatcataataatactgctacttggatcagaaacaaagagcatttctaaagcttgaacaatgtataactggaaacgagctctcactgagtttggaaatgcaggcactagagggtgctcatttctcttccttttccaatcagggggctattcaaaggctgttctagaacaaggggtgagatcctccacttccccgtggtgatcaggctttcagaggtagaagccttattagttcataatcagccgaactgacctcaccatcaaatgtatcgacctggatgctcaccctcctcagcagtcagagactgtgttcaccaggagcttgtgcgcttttacggagcacattttatcctcggtttattcggaaacatgggcctttatagggggttccataaacagaagctttctatattttgtccatttagacactacaaagtctgacaccagatgagaggtgttgcttaaagcttgtatgtggtgaagattttttaacaaataatatataaagaaaatgtcaataatgctctcaaatccaatcccaacttccatcggtaaccaatactaaagctctggtgtgctttgcacctctcttttctgtgttcatgcacacctttctacccaagtacatctacagaaaatgggttcacctgtacactttaccggccacatgcatactcttttctgttaatataccctggtctttattgttccagattgatcgatacacatctaacttgctctatttgctgcttcatattgcataatgagggtagacaggtacattcgtgctgtcatctgattcccaaattctgccagatcttttctaaagtgactgagtggtctatttatgcttccaagttctcctcaccccagcacccagttgatgattccagcttttccatcactcatggtcctagcaggtctgagagctctatcagttctcctgcatgaggaggcagggaaggataaaaggacagacctttatcaaacctaccagaaactacacagtatctcagttcatcctcataaagcattaaggggaatgtttgtcttgttttatagatgagtctagatgaggttagagtctaggaaagttaatgaatggccttgcccatggtctcagagctaataaatgttggaggcagatgaaggacagttttcttgcttctgtgtggagttgatagaggggtcactggattttgagggaggtgaagtccagaaccatctggggttgtcttcagatcagatgccagggtgcaggagagtctgtgtaccctacagcactgtaggtacaagcatcatggtgttggcagtggggaggtacagggggtaagtgtttagaggcctggaaccagaagatctgagctttgagaaaataatccccatcacaagatgtagcagagatactgatgtggatacactaggccagggagctctgtgaggagctgttgttaaaatgagggagggaggagaaccaactaattggtcacttcctatatgtgaaatgtagaggaaaacaatattaactagaatcctatctcattttagtcagttctcctttgtaagtagttggaaggtgggataatttattttcaaggttaagtaagcatctatacatctcctttaccttgtgaagtctggtggcgaagcgaaaaatggtacagccaatggagtcacagtttaataaataactcagagttcaaagggagactcttatgggccagaaattggtaaatgttcctgcattctaaaattaggaggatcttattttctttgaatcggcagagaaggaagcacaggcaatggggagggacagttgggaacacggcagagtggccacaggatgtcgaagacaaaggacatgtaatatcaaattctaagctgtgaagctgtgatgcaaccctccaccttctcctaatggattttttaggtctcagcacagatgcccacctgagggagtaatttctttggaaataaaggacaaatagctcggttaataacaagtccaccttacaaagcacacctggaaatggaaacaagattattcctaaggccttttctactctaagagtctctaacttggtggcaaggtgagaggtgaggatgggggtgttttgatccacacgtgatgagtaccatgaagctctaccatgaagcatatagtgttgagtgtgaatcagagccctaagaataactccctttacgttgttgtgccctctgccatcccaaacccaccccacccataattaagcagccacgaaaatgaggggagccagaaggaatcaaaccctgctgcttggttcagtagacagaaggacctggaggaagggtgttggctgggtctaggagaagatgatgagctcagaaaatagacaaggagaaaccccaggggaaaacttgtgaaaccccggaggaatcacaagatatgttatttgagctccttttaaattttatttaatactaaattaatggcaggaatcctgcacaaagggatattccctatgaaacatgacatctcagataaaaacagagcattcttccttaccctaaagtctgccctctctccccaagtccctcatgcatcaggtcacctttgtgcccataagtcatgggcagcgctgtgtggtcaacatcatccacacctagaggacagtcagcaaagtgaggtggttctgcctgctgtggtctcaccccaggcatggaaagcaagagccctgggagcagcggaaggtacacagctgggtttctcaggagtctcatctgtcagtgaattgacaagaaacagagcaaaacgactcctccaatgttgatgagcctgcccctgggatttggaaacttgataacagagaaaaccaatatagacaaaggattttaaacaggattatggtcaattaagcaaattagaaaaggatacttgaaggagtatttgggacacagaagtcaaaaacactaggaagacatgaggtgtgtccctaagactctagactacagcactgtgtagataactaacacttaactattaattatatcattgaagaaataaaatttacattgaattacaaactgtttccaaaaggtcatgaaaatcttgtagacttgtttcaaatcacacaaatgtgttcttctcattctcagctcttcactggtgcatttattttggatttgatcatctggggaagaggtgtggcctctcctgaaaggaggctctgggcccaggcagggagactgaggtctcagaatgactcccttgagagtcctgttcccctttcatcaatgcacagacccagaagacccctacgtcctgcagcccctgccatgagcatcgggctcctgtgctgtgtggccttttctctcctgtgggcaggtgggtcctggcagagccccttgcgtggatgtcaaggcccatcccctttccactggggctgcagcatcagctttgttcttctctgcaggtccagtgaatgctggtgtcactcagaccccaaaattccacatcctgaagacaggacagagcatgacactgcagtgtgcccaggatatgaaccatggatacttgtcctggtatcgacaagacccaggcatggggctgaggcgcattcattactcagttgctgctggtatcactgacaaaggagaagtccccgatggctacaatgtatccagatcaaacacagaggatttcccgctcaggctggagtcagctgctccctcccagacatctgtatacttctgtgccagcagttattccacagcgctgcaagcctgtctcctctctgcacataaaggcacagaggctctgccctcctcccacccaagactcaaggatgccctgggcagagttctctgcaccaggaaccttggaacccagagtggccccaagtggccaggacagtatgagtctcactctatgccaggtgccacttcaggcagtctcagccaggcctggaagtggtcctaggttctcagatgtctcctttgttgctctctctggtatatcctccaagctgtcctttttgtgtagggccagggcttccccagctcctactttcctactcattatcctgaatccaaggtgcccaggatgaaactggatttgtatgtcagattcatctatactcccatctctccctggtgaccctgttgcttcctctctctatggtttcccccagcccccatcctcacgtgatctctcctgtggcccacctttcccatctgggtagtcaccctccaagtccttgctgggtctctcctcccctcacctccccgcccctttctactgcagccattaggggagcccctgttctgtgcctccttacttcccatcacagagacttcaaagtccatttcctctgccctgggctggagccttccttcctctaatggccagctcctacctgtgcttcagatctcagcatgatccgcccctcctgcgggaagcacaccctcacctccctgctgagatcaactttcctctcataagctctcacagaatcatatgtctgttggtaacctttagcacagttggactttctcaggtacttatctgattatttttgtgctccacccaatttttttttttttttttagacagagtcttgctctgtcaccaagctggaatgcagtggcaccatctcggttcactgcaacctctgactctttggttcaagcaattctcctacctcagactcccgagcagctgggattacaggcacacaccaccacacccagctaattcttgtttgtatttttagtagagatggggtttcaccacgttggccaggctggtctcgatctcctgacctcatgatctgcctgcctcgggctcccaaagtgctgggattacaggcttgacccaccgcgcccggcctctccacccaatttttaagcccatgggagctaagagtgtgccggctgcatttaccaatattggtgcctggcatgtggggagacccatttcacagagaatggatgagtgaatgagaggctgagtgagtgatgagtgggtggacgaacaaatagtaggaacaagctacatctactgtaaactggcagagatctagcattaagtacaagaaagcccacccctttgactgctgggctcaggtcggtcttggaaattgatggggaatcactatcatggcatccacacctgtgtcaaggcttcctcttgtggctgcagcacctgacctcctccaggtctctgtgctctccttcaggatctttccccacaacaaatctagacagatcagagatccgcttcaagaattccatccttaaaggttgttccttgaaaccacttctggtaagaaaatctccattaggtttgcatcaataaaacagggccactacaagtttgagagtgtaacagatttatgatcagaattagactttatgcatatgtgggaggagctgaggaagacaaggtcttgaggagagaagtcagaaggtgagggagccagtcagtagtcagggctcctgaagctctgggcaggacgtgctggagtggcaggaacatgagaggatcagagcatatcaggccatgcagtgggatcttgagctgggagcacaggaaaatgccaaggaaatctgtttctgggaaagctgttccctctctatgggggccacccctgcagatgcactaccaaacactgtgggcagcctggctgctgttggccagcatttgggaagatgaactggacacagggtgcagaaggaacaggacttcctaggtctgttggatgcctctatatctgctggtcactgactctcactgtccaaccacgataacctgccaattgtcatagtgactgttttatatctgtcttctaaatgttacaaaatgtatccttgaccatctgtaacccagaatgataaaagaaatggcattctggtaaatacaggctcttgccattgtagagttgacctaacacaatccagcacaggatggattctcccagattaaggcattggacctaacacaatccagcacaggatggattctcccagattaaggcattggatcacacaactgccccaacccgccacaatccctggtcttctatccgggggacacctgtgctgcccaggtgaatgtggacacaatttgtgtgtagatgttccagacgctggtgactaacttttcttttaatcctgtgcctgaagtctccctccacccagagagtctatatgtgtatatctgtctgtctatctatctctatctctatctctctctctctgtaatttccacttggaagaaaatgtcatgatgactacatgttactgggatttatttatgaaaaggattttattaaaaagaattagaaaatttgaatccttttctgaatttttccttgggactgtcctgagagcatttttgacatgaccaacctttgtcgtgtgtgtatttggcagcctagagtgcagcagagagttattggccccacatatttgcgagttagactggagatggctgtaaaaatgactgactcttagtgttattcactctcagtctgggcctcactagaatgtcacagactaccatcgaacaaatagattcccagtatgaagaatattaggacatagcaacgaggaaacatgagcacaagcaacaaacgtttgaagtgcaaacctgaagactcgaaattttggcattataagatatgaaagtttggagagctacatttaaatgaacatgagggggaactgaaacaaggaaaaagagaatgtctgaaaccaacaacttgcataaaaattgtcaaatagtatatctaggaatgcctcatacaatcactgaaaacaaaatggaaaggcaagcagttgataagctcctcctatagagatttttagtgatgtcaaagatggatctgcaggagtgatctagaatgcagcacagaaaataaaaagtgaaatatgaaagaagttaaagaacaaggaagaaaaaaatggatgtttcctatgtattagaatatgcatatttttcataatttctcattcttttcttgcatatgatttatgtttcaaaaagataaataggaagaatgttatgaggtgatatttatgagatgttagctgagaatttttagacgtgtttcaggacctaagttcagagtttccagaatcaaaatgaatctcaaataagacagtcaagtcatagggaaattgtagaacatgagggaaaaagagaagattttgaaagcagtcagaaaggaaagagaaatacgtcccatagaatagatggagaacaacagtaagtcaagatagtagttaaaaataaccattagctcaattatcattctccttcatttaaggtgagattgattaaaaaaacttttagaagtggaatatgaaaaatgactgctgtgagtttgctaccaaggtctctttactgaattacagttaagaaaggtgggaaatgatcccagaagaaaggcatgagggcagttcgtgagggaacccatgtgatgggacagtcccattggacacgtgtgactgtgggaatggaggaggctggggcatcagtgaggatggcagaggggaccctgaattgcaggatagacaatgagctcatgccttggtgccttgtgttgggggtgctgttagtgcatcgacaggacatgcccagcagacagaggagtggctgtaggatgagaaggtgaactcagagatgtagtgtgaggcccacgggtccagacagcatgggagcccaaaaaatgaaccatgcattgatagtggtaaaaagctgatacatatttaaagcagcacccaagtgtgttctaatagaaatgctgtgaccctgaggtcctggggattgagagaggaagtgatgtcactgtgggaactgccctgtggagacaaggacggcccttatcctctgcttctgttcacagtgacactgatctggtaaagcccccatcctggcctgaccctgccatgggcaccaggctcctctgctgggtggtcctgggtttcctagggacaggtgagtcctcagaacaccaagtagtttcattttttctgtttgtaggtgtgtgtgtgtgagagagtggttgtgtgtgtgtgtgtgtatgatgactacaaatattttccttattctgttgccaaattctatttccacagatcacacaggtgctggagtctcccagtcccctaggtacaaagtcgcaaagagaggacaggatgtagctctcaggtgtgatccaatttcgggtcatgtatcccttttttggtaccaacaggccctggggcaggggccagagtttctgacttatttccagaatgaagctcaactagacaaatcggggctgcccagtgatcgcttctttgcagaaaggcctgagggatccgtctccactctgaagatccagcgcacacagcaggaggactccgccgtgtatctctgtgccagcagcttagccacagcatggcacagttgcctccttcctgttcacaaacctcatccttctctctccttgcagctcctagagaccctaaacagaggcctctctttgctcctcacttttcatgggaaagaattacatctggacttcagctgttctttgggtagaaagagaccacagattcattcctgaaacacagtgactgaaaatgtaggtggtgaaaacaatcatgggagtccttggagccagctcactgctccaagcaaggagtgggtgtcttagtcttggccttcagggcagacatgcatcttctataggtcttggaggctgctgtgctgcccacatccatgaggttgtcatgggcaggaaacacgctcttctcctgcatatgttggggcatctggaaggtctgaggttacatcccaaggaacatctttcttctgaagcctcttctatccgtgtcacattagaggttttctgcaacaaaatatcgaacctctcttcctgtttgaagtaaaggtctttgcaacttttgaaatccttacttgataaatacagtcaggataacaataagacttcatttcttctgcctactttaagccaggtgtatccttcattttatttccatttgctattgctgctgtcctgatagacagaagtatgcattcaccaccactgccagttcaccttgattctctcaggaaatctgatttctagactctgagggttttcattgctgtccaactcatttgatttgaaataatttttctgaggccgttaagaagtgttatatttataatattgattctattgctgtttatttttcatattatatattgttatatagtacttgttatagatagaagtacaatgattatattgcaatagaatcttccacctgtctgtgggtgccgctgcagtttgtatctatgaaagcgaatgcactggtcagagctgatgtgattatgaatcatgggtttctgagagtcctcggcgacagaccacttctcccagtctgggactcagtgtcccagacacagccatgatagaggtgccctgagtctttcctaggtaggaggggcatcatagcccttcccaattcactgatcagaaattgtggttgtacagataccaagtttctttcctcagagaatgacggtctctggcaggcagttgctctggacccattttttattgtgccatcatgaaatccctccttgctcaggtgccctgtgtctcctgggactgagtaaggccagggcacagatgggaattccctgtcttcctagaccttctctctaatggctgccaccttcctccacttgactcctgagacatctggttctaacagtggataagctctgacactgaggctgaacagaacacagtccacaggtgtaaatggtgctgcaaggacatgtaataaagtgagcagggcttccaatttatactgagaatgaacatgcaacaggagcaaagggcagacattactaatgaacaaatagggtttctgctctaatgaaatcattctgttgtcttaagttaagcaggagaaacttttcattgcaattacttcaagtcaaaggctagcagctcccaaccaaccaggataactctttgctctgtgatctcagcagcttcagaggactcagaaatcctttctctgcacaaacttccctttgtccattccaaaacccaggatcacacactgatcctatcatgaaaacaatgaggtgtgctatagttgctgtggcctcatttttagggtgttcagtaggaagcattgaagaactttgaaagctttgctcttgagtctagggatgtgctggagccagcttgtatcattcagaagagccaaataggcatactcttcccagctccctatttagtgaagccatgttggcggcatgaaatctaccatggtgggtatgctggtacaaccgaaattagcaaatgctaccagccatgcccccaccttcacagacacccagtttatcagcacatccctggagtattttctgatgtccgttatgccatgtcttgtgggcccaaaagggctcagaattcacctcccctctagtcttgctcctagaagccatcatctaagggggcctccattgttcctatttctgttctacctccaaattctcttgccttgtggttgtctcctacaagcatgccactttggaacatgacaattattttgattgtgactaaaggtatcactgaaccagttaattttttatgaattatctttcctagcatggaatattcagatgctggagtcattgggaacagagatgagcatgcagcaacatgcaagttgtgaaacacttacagccccgctattcttctgtggcactgacagaccctgaaacaaggactattttgctttggagactaagcagctccgcaccagtcaggaatgactctgcttttactttaggctgagaggtcagaaggatcacaccctcagtattctcctctccaaggcggagtgtggccactctccatctcagtccctggaagttgcccagggctccctgagaatccctgctctggggcagaatcaccaaggctcatcctcgccagctccccacaggctccagcagggctttcctgccaggtgcagggcacaggaatggctctgcctgtctcttaggtagagggaggccatacaatgatgtttgtataagagggactgggattctgggtctcctttaaagtatttgacaggccaggcagggtggctcacgcctgtaatctcagcactttgggaggccgaggtgggtggatcatgaggtcaggagatcgagaccatcctggctaacatggtgaaaccccgtctctactaaaaatacaaaaaattagccgggcgaggtggtgggcgcctgtagtcccagctactcgagaggctgaggcagcagaatggcatgaaccccagggggcagagcctgcagtgagctgagatcgcgccactgcactccagcctgggcaacggcgagactccatcttaaaaaaaaaaaatttgacaaaattttctttgatttttgttctattttgccatctcaccaatgaggagagcaatctcttggtagttatattgtttttggctcttgggaaagtttttgtggttaagtcacattaagaaattgtgccttttttccctgttcagatataacccaaggcagtgaaagaaacagcaataattttgaaaacagttagttatgcatcctatgataaaggtgttaagtttcattgcccacatctaactttcagtctagtggaaatgaaaaggcacagttagggggcatgtgagcatgccatgagagaggtcaatgccaattgagaagtctgtgccaatccccagtactgtgggattgaatgggagggagagatgacctctccttcagactgttctgaacaaggagggagtgagagttcatccatgggaacctgaggaggagcaaatcccaggggcatctaactcagggtgcaggagcaaatccttggagaggaaaatggtccagttcagctgtcacaggagataggagaacgcaaagtcatgtaatccacagtcccctggctgatttgcttccttatgatcctattttgcatccgtgtttcctcaactcccgctgccccctgcctcttccagaatcatgttttggctctttggtgctcagatcagtggatgtgcattgtacaagttgatcatttcctgtacaagcccattgctgctcttaattatatccatccttattttgtgcattaggtactgctccctacaccactgcttattgccgtgtaataagtctcattttgtgtatttcagttttactttttattattacacatttgacttcatcttctgcttatctatacttttggggtaacattgttatttttggaggacatttttgtttatctttagtgattcagattaaataatctctttatacttcaacgtctgtcttttatttctatttaaaaccaaatattattttcttttattcctctcattctgttcctctttctttagttgatagttttaagggagaaaaatttagactataactggagctacgtgataagagttattcagaatgaggctgggatattaacattgttaactcaaagcaacagtcagcattagaactagtgttgggatgagggtttagggaagctgctcataaaacctgcagaatggtacttctggaatattctctcagctcactctgcagacacttcccagcattccttgggccattgcagaagcaacaatgatgaaacatcacttactggccataagatggcactgtggtccactgggatctaaagggctctggggagtctgggagagcagcctaggagggaaagggttaagaaaaattagggcttagatccagtattatgcagatgttgcagcagttttcagttttgccagactacctacagctatgcgagaggtgggaagtccctctaaactttaatgagatctacagttgaataattttggctggacagctttggtgtcagggacaggtgcagaggagcaactgcctcagagaaagctaggggcaggatgtgccctgagcccagtgcatctgcgctgcacctcatcttccctgcaggtcttgccaggcaacagctttaacctgctcaagtgatctgggattctataagtttgtaagtcgtactgataacatcatcttggctgagattccattgggcaccaagcacgtgtactctggaggacaaaaaatattgataacagttctaaaacactcaagtaaacaaactactgaaggaaaatgttaatagatgcaccaaactgtactgttagacttgaaaataatcaactaatagaattatcaaaaagagactacaaataaatctttactaagtatttgtgggcatcgagcagtgtctgagtcctctcagggtagattaaggaaggagttcagctattatcatgactttggcttggatgaaaatccatgacctcctcaactgattttcttgtaaaatgttacagaataatattgagcaaacattttatttttctccagcctgtatccctccttagcactaacaggtaaagcggacacctagaggcacggtttctttagttgggatccattaactgcaggactcggaggtccatagctgggcttcacagggagtgcaaaccccacgtgcaaggaaccccgtgtgtctgtgctgtgcccaactcccttctgtgaggctgccaaaggcggaggtccgggtgtcccaggaccccactcacaaagaggggagcaggctgcttgctgggcaaaaaaatcagttcaccaattggccaatatgttgaaaaccaaaaagaaaggaaaggctcaattgtgagactgacgaacacccaatttcccaagttatgaaatttgtagcagctcatggttctcagaatggtttcaacagcctatgaagatatttttagaaagtttttgtttgtctacagctttccttgatattgatcctcaggtttttttcagcccactcatcacttgaccttattttgtggccaaatttcagtgttgcctatttcagtcactgagcacttctcattctccaaatcttacacagatatgtgtgttcctgtcttttcttctttttgtgtgattcatttttaaattgggctgtgcagaatacaagcatacatttgtaaatgactcccatcttttatgcaatttagctgtttaatttttagtaatactttttatttaaggtgtaattaatacacagtaaaacacaaatattaatacaaggacatcctggtacattttgacaattgcatgcgccagtgcaatagtaactaaatgattattaaaaaactttccatcactcaagaaagtgtccttatgctcctttccaatcaatttctatcccagagataaaaacttttctatttttatcaccactgactagctttgtctattcttcagtttcatataaatggaaacatatttttattatttttcttcaaaattagtagttttgaagtgtattcatattgttgtatcagtaggtcattctttcttatgactaatattccattgcataaatataccacaacttgtttatccaagctcctgttgatggatatccacgttatgtctgtcttcaactattatgaataaagttgttgtgaacattcttgtggaattctttcttgcgaacatatgcattcttctttttttttttgatatagatttaagagtggaaatactcatagtgtagacacgtgtgctatgcttgcgtgtccccacaaaagctcatgttgaaatttgtcagtgtaatggtattgggaggtgggacagttatgactaggtcatgagggatctgccctcagaaagagatcaatgcccttattggaggggtgaattatgtcttgggaacggtcttctgataaaaaggatgaaatcagctgttttctctgtcttgggtgcttgcttccccttccttctgccttggataacagcaggaggccctcatcagttatggacccttgatcttggacttcccagtctccagatctgtaagccaaataaacctcttgtctttataaattgcccagtctgtgatatttctctatgtcagcaggaaagacattgaaagaaaaaatggtaccaagagtgaggctgttgctataatacctgcaaatgtagaagcagctttggttaatgggaagcggctaatggatagaggttgaaagaactgggaggagcagactagcaaaagcctagactcctgaaaacagagcattaagggcaattctggtgaaggctcagggggaaatgaggaacaaggtatcggaaattgaagtaaatgccatccttgtggtaagtagcaaaatccttggcaaaactgtgttctgttctaggaatttattgaatataaaaattatgagtcattcgctaggatatctgctgaaagaaatatctaagtggctaagcattcaggctaacgtgtgactactttcaggcaccaggaaatttaaccaagcaagaagggagccaagggaatagattttgcaaaccagcacagatggtgaccctacctccctctgctgtcccatctccaataagacaaattctgtgctgttagctgttaaagccctagaattatttctgaggaatctgtactcttcataatttacagacaacccagctctgctttggatctgatcagatggactaaatcttggggactctgcaccactggccactgaggaaagggaagagaatgttgcctgggacagaaaatatagtaagaaacattggtgtgaatctagcatcagaaagatgatgtgaggacagcaaggaagagcaggaacctgaagtttaatcaggctcctcgccctctgctgatgggcatgtgtgtgagctccagcatggagcaccgcagcactaggtcagaggagagtaagagggcgatggggcagcctgtgagctggggcagtgtaggcagaggagtaactgtatcatcacagaagcttctgccttcaaccatccctccagctctgcaggacaggtagagagtccagggtctgtggggcactagacctaaggaaggcttcctggggaggacacaggacagcgacatcacaggatacccctcccatcaggaaaatgaaggcccagaactcactcggctcttccccaggaagaccaagccctgaatcaggtgcagtgccgcctggcccactgtgccatgggacccaggctcctcttctgggcactgctttgtctcctcggaacaggtgagtcctgggcacaggacagcagccccattctcagctttcccaccccagtgtcctccactttaccttggggaggacctctgggctgtctcctgagctcatcctccatctgcttttcctgcaggcccagtggaggctggagtcacacaaagtcccacacacctgatcaaaacgagaggacagcaagcgactctgagatgctctcctatctctgggcacaccagtgtgtactggtaccaacaggccctgggtctgggcctccagttcctcctttggtatgacgagggtgaagagagaaacagaggaaacttccctcctagattttcaggtcgccagttccctaattatagctctgagctgaatgtgaacgccttggagctggaggactcggccctgtatctctgtgccagcagcttggcacagcccagcagaatcactgacattctgtatataaacttcctgccttagctttgacttgagagctgcaggccccactcagtcttcactccttcaagggaagcttttagttgtttggaaggcatgtcttgtgtcctactgagggcacagctctcccaaccaacagagcccaggtttcctgtgccctgagtgtgcccacttctccgctgcatcttcttgcagcttgtcacttcctgggtaacttcagtagaagagtgactgctgagccccagatgtgtgctagattctttgtatttgttatgggcttaaagccttgcaacaatcttgtacatcaagcattcttattcttccttgacagatgggatgctcagggacattgagtcattttccccgttgtctcctggcttgtaaggatcagaagtaggaaacaaagtagtccatccattttccacctacccccctgctccatcatcaccttctgcatcctggtcagagtaagtcagaaccctcacactgccctctagtgaccagcagggccgcagcagaggctcagatgccttcaggggtcattactatggcctcctcattagcaactttgaggaatgttaaatttcacactttctaaaaatcatttatatgcattccctgtgtctttccccagtctgcagcttatattttcatttaatggtgttttttgatgcacaagagtttaatttaatgcaacaaaaactaaaaacaattttgtttgtgtgtagacaaaaaccgctttcccatataagtgtctaaatatatttttctcaatttattctaggaaaatttaagtttggattttcatcactaagaataaatgtatctgaaatatatctcatgtaaaaaataaggtggaaacctaggaatgggagcgaaggacatatgttcagtgaagatgaaatagtgtgtcaaaaagagctggaaagtagacacccggagctgatggtggagaggtaggtggagggcaaataatcatgaaccttgtcagtttgttatcttgtataagaaagacagccaggagtagagaccacatgggcaaaggtttatggctggtctgtaggttgaaggttgcagcaggtagagggaggaatagcaggcagagggcagagtcactgtagggcaggggcagtggcatcatcagttgactttactgacatccaggaattatgtccctaacacacaagctgaaaaacctcccacaatttgcctatttttccctgaccctgccatggccaccagactcctcagtggtgtggccttttgcctcctgggggcaggtgagtgccttaaagccttttccttggctcaccacatcccagcctaagcctttacctcaggtctacattattggggtccctccttgggcactcaacttccttctatcatagatttcacagaagctgggacaaccagatcccaagataccagagaacaaaggcaggacgtgaagtgacatggagatgcctgagactgccatccatgactacatgtgtaggtgttaataggagccaaggctggtgcacagctgatccgtcccagcacacactatacagaatccctgagggtctgtgactttttctcaaagccaaatatgtggccttggtgtcagacagcctctcccagacctctgtgcccccttgcaccagctttcaccccacagccaccttcctctgcacacaaagctcagtggaaaatatagatggccttgtcttcacgagaccgtgatccaggcagtggaaaacattgtcccataggagtctcccaacactgcccaggctggggccctcagatttctgagcagccctgtgcatgggaaactctgccctgtgctgagcttctcttccaggccagtctcagctggacgatggaacgcacataaccatgctttgcgtggatgcagcctctcttccaggcccctcctgcagctctgacctcagaagtcctcttcctcagctgctctcagaaaggaaagttcatttgaaattgtatatttgcagacagcattgacaatacaggtctatgttcttttccctgtcagccttcacaagtccatcttccccacaccacactcacgtcagtcctcagcctcttccacgtgatgtctgctcccagctgtcttctcccttcctctgcaccctcaccttcatgtcaatcacagatgcctcaattcaggcccttcctcatgggtcatgctcctcccaccaaagccctttccactccatgctgtatcctctggctcatcagaagtctcttctcttttgttctttctccaaatctcagtttaactaccaccatctctagggagacactccttcaacagttttcctaggctgctcctccctattgtaaatgctcacagtttataatatgcattaatattcatagacttagcaccatagtcatttccctgactttgtgtgactgtttgacacttctcttgcattctccactgtaaaaggcatcattctagaagttgtggatgttttgttccccattttattgtcagtaccaacagcggttccaggtgccactgaccaatcttgaaagaataaagaacagatattgaaaggccctctgagttcccacatagactgttccagaagtctggacacattaaatgggaacttctatcccttcatatcctaggatcaaatgagtcctggaaacagaggagaaatccctgtcatggatgagtaactggatccaagcctttctgcactactgaacttcctatctgcccatcgccttcctgcctagtctcctccttcaatctccttccctcacaggtgtcctggatttgggagtctcacagacacagcgcacctaatcactctgagagagtgatcagaaacataatgtcaaacactggcattaaaaggtcatggagaagaaaacaaatgccttccccattctcttaggcagagtgttcccaaggcacaaatatctctttgggtggctttgaggccatgctacctgacacactgagctatattatgggtgttcatttccatgaattggtgggcaatgctagagacacagacctgatggtcaccagcttcctccagcccacacctgattttggtgcagggcactgaacagagacctttgcttattcccctcctttgccagttaggaaaggctgattgtgaggcagaggctccacttacagagcagggctatgtgttagtccctgaagaattgtgagagccattctgggtggaaataatcaaatatacaatcaccaaggatggcccacggacagactgaagccccaattttgctggaatgatttgcatctatgctttaaatacgaatgaagttttatctctttaggcaataaagaccaaaaatagactagctattttaaataactgaaccttaaacaaaccaaagtcagaacatcttccctagggacagcattttcttctacccactcactaaagctgtatttgagaaagctgtgtgctgttgataaacactggaatatcattacaattgacatcgtaataatactgctacttggatcagaaacaaagagcatttctaaagcttgaacaatgtaaaactggaaacgagctctcactgagtttggaaatgcaggcactagagggtgctcatttctcttccttttccaatcggaggctattcaaaggctgttctagaacaaggggtgagatcctccacttctccgtggtgatcaggctttcagaggtagaagccttattggttcataatcagctgaactgacctcaccatcaaatgtatcgaccttgatgctcaccctcctcagcagtcagagactgtgttcaccaggagcttatacgcttttacatagtacactttatcctcggtttattccaaaaaatgggcatctataaggggttccataaacagaagctttctgtactttgcccatttagacactataaagtcagacaccagctgaaaggtgtaacttaaaagcttgtatgtggtgaagattttttaacaaataatatataatgaaaatgtcaataacgctctcaaatccaatcccaccttccactggtcaccaatattaacactctggtgtgcttcttttcacctctcttttctgtgttcatgcacacctttctacccaagtacacctacagaaaatgggttcacctgtacactttacctgtcacatgcatactcttttctgttaatataccctggtcttattgttccagattggtcaatatagatctaacttgctcctattagctgcttcatattgcataatgagggtagacaggtacaattgtgctctattgtctaattcctgaattctgccagatcttttctaaagagactgaatggcctctttaggcttccaggttgtcctcaccccagcccccagttgatgattccagcatttccatcactcatagtcctggcaggtttgagagctccattggtttctcctgcatgaggagacagggagggataaaaggatagacctttatcaatcctaccagacactacacagtatctcagttcgtcctcctaaagcattgaggggaatgttagtcttgttttatagatgagtctagatgcagctagagtccaggaaggttaatgaatggccttgcccatggtctcagagctaataaatgttggaggcagatgaagggcagtcagcttgcttccatgtggaattgatagaggggtcactggagtttgacagaggggaagtctagaaccatctggggttgttttcagatcagacaccacgggtagtatggtctgtgtaccctacagcactgtagatacaagcatcatggtgttggcaatggggaggtactagagaggtaagtggctactggcctggaaccagaagatcatagctttgaaaaaaattattcccagcacaagatgtagcagagacatcaatgtggataaactaggccagggagctctgtgaagagctgttgttaaaatgagggagggagaagcaactaagtggtcacttcctatacattaaatgtagaggaaaacaatgttaactagaatcccatctgattttagtcagtttttcgtttaagtagttggaaggtgggataatttattttcaagtttaagtaagcatctatacatctcctttaccttgtgaagactggtggcgaagggaagaatggcaaggccaatggagtcacagtttaataaataactcagagttcaaatggagactctcatgggccagaaattggtaaatgttcctgcattctaaaattaggggaatcttattttctttgaatcagcagagacggaagcacaggcagtggggagggacagttgggaatacagcagagtggccacagaatgtcgaagaaaaaggacatgtaatgccaaattctaagctgtgaagctgtgatgcaaccctcctccttctcctaatggtttttttaggtctcagatgcgcacctgagggagtaatttctttggaaatgaagaacaaatagctgtgttaaatcttaataacaagtccaccttacaaagcacaactggaaatggaaacaagattatttctaaggccttttctactctaagagtctttaacttggtggcaaggtgagaggtggggggtggggatggtgttgatccacatgcgatgagtaccgtgaggctctaccatgaagaatacatttctgagtgtgaatcagagccctaagaataatgccctttacgttgtttgggaccaaacccacctcacccataattaagcagccatggaaatgaggagagccagaaggaatcaaaccctgctgcttggttcagtcgacagaaggacctggtggaaggatgttggctgggtctaagagaagatgatgagctcagaaaacagacaaagagaaatcccaggcgaaagcttctgaaaccctggaggaatcacaagtcaaatttctcccagaagatggtggcagtgactcaccttcaggtacaactggctggtgctacagagctaagatggacttagtgtgttggcagtttgcaaaatctgggccatttggtcattttcttcagtgactttttaaagtgaagttttacttccaacattggcctgatgtgtgggtctgttcttatgggggttagggttagagttgctccattacttgagtacccatgaagtattattggtcatagaatgagcaggattatcaggagtagaaggggtagggagagggagaactgttaagtgaagcagtagggttgagtgaagagtattttagacatatgagtacatagagggatgaaagcccagctagcccccagcccccatagaaggaagatcaagatttgacaactaggagaggcatgattacaccatgcagcttgatcaaggactgagaaagctttctagacaaatgacaggtaatgacccacactgtgaatcggtattgaacgtgagatgtcaatatatattcatatatccacttatatatctaaaataagaagtccttacaaaccctgaaaacataaaccctcactattacaggatgtgcaggtgatttggatcctgtgaagaccctcaaacaggattaaaatccagtaggcagaggtctctgattctttgttagctacagaggaagatgtgctatgatggacacctagggggtctgggggtcttcccatccccttcccagatccacacctagaggaatgtcaggcagcacaattcagagaaccaccagaaaagctgtgagaataggactccaatctgaatccagcttctctcagctctgcaccccttgctgtgtaggagtcagtgcaggagaaagctgactgggtgagaagagaagggatcctgaaccatgccagaggagacctgtgaactgggaaatgagcagcaacagcaccaccacagacacacactcgccaggcacagggagaggacagatcctggcctcttgtagcaccagagctctgaacgccctctacctgctcagtctcccatgggatctaggctcttctcctgggcgctggacatgccttggtttctcaaaaccaggtgtgtcctggatgcacctgggggaatctcagctctgaatatgccaagccttgccagaggaaccatgtattttgaaaacccacggggtctgtgttaaaaacaacaatttccctctcagagcatgatgggattccatgttcctgcttagttgtgctttgtctcctgggagcagatggctctggaaacctctgagggaaatccctgtccctgcaactgctgtgcctcagttccaaacattccccatgcagtctcctacgtcctagctccaggttctatctccattcatgaaactgtgctcacacagacctcttgaaagcaggtaatgggtatggagcagcaataggtgtgaatacatcctactttatggcatcatctatgggaagcaatgtcagctggaaatgcaccagcatgaattttatactattgtgatgtagcacttctgagattgaaggtacaatggcatattccaagctggtcaaccaaacatctcactccatcagctggacacacatcccctagtggggtgggattctgtgggtctccttttgccagcagcaaagaccttgctgaaccatctcctctgctttgcttcaaacttttcctccactttgcaggatcttctcaaatctgggtctaacttgcctgcagtgagaggaattgtgactattgtccctcatatgaaagagggtgcccatgaagttttaagagttaagttaggaatgaaaatgagaaattaattgctcataatgcagactgttaggaaccccaaggattaattcaactccctattttttaattgtactactcccatcacaatgtcaagggtaaaacagttctgactttttctaaaggctatggaacatttattgatttcagaggtgacttagaaacacaggaggtgtcgtgataagtagtagagacaaaaaagaaaaagtattgagattaatgaattcatatggggaattgtttaactgttctttttttaacctttagaatgagttgaagatcccaacttagcttggtgcctgctggaggcaacgtttcttcccttgcccctctgagctgtgaattgaaactctttcgggaaaaagacgcggcaattctctccacttcccaaacacctcccactcctacccagaccgtggatgggcaggaaatgcaggaacagagccagaaacaggagatctccaaggaaggttgacagtcagcactgggatcgtctgtgtaaagtgctgctgaagcagccaggtggcatgtccagccgacaatgcgaaaggaaaaagtgagaagacttcccgaaggcggagggtggaatgcgggcagcagccccctggagggctgagtggggaaaacaaaatggacctcacagaagctgtgtgtgtggaaacccacttctgacttatcacttgtcatgaattctatgcttcatggtgttacaccgtttattgtttctgatgagtgacagtaattattttctttcttgctggtacataataaagtggtgcacatcagagttgctgccatcttagacttaactcatcagtatcaggtgatcctgaggctcagtgatgtcactgtgggaactgctctgtggcgacaaggacgtccctcatcctctgctcctgctcacagtgaccctgatctggtaaagctcccatcctgccctgaccctgccatgggcaccagcctcctctgctggatggccctgtgtctcctgggggcaggtgagtcctcagaacaccaagcaatctcattgtgtctgtgtatgtctgtgtgtgtgtgcgtgtgtgtgtgtgtgtgtgtgatgactacaattgttttcctcctgttcccaacttgtatctccacagatcacgcagatactggagtctcccagaaccccagacacaagatcacaaagaggggacagaatgtaactttcaggtgtgatccaatttctgaacacaaccgcctttattggtaccgacagaccctggggcagggcccagagtttctgacttacttccagaatgaagctcaactagaaaaatcaaggctgctcagtgatcggttctctgcagagaggcctaagggatctttctccaccttggagatccagcgcacagagcagggggactcggccatgtatctctgtgccagcagcttagccacagcatggcacagtcgcctccttcctgctcacaaaccctcaggcacttacttctccttccagctctcagaagccctgaacaaaggagctgccctgctctttcctcagcaaggagaatgaatgcatttggaactgcaggtgttcttctgatactaggaggtcagaaaataacctctgaaatacaggaacagggaatactgggtagtaataattttgacttatggatttctgggattccttatatatagttcaaatttccataattaggatataacagagcttagtctcatggatagtgactaagtaaatattcttttatagaactatgaagtttcagcacatttatattaaactactgttaccacatgtcaccaactcagacctataatctaccaaggagtggggaagccaaacgcaaacactgctaaggccatttacagctaccacccttggaagaaaattggaatctttagtaagaatttccatcaaaatcaattttttagaaataactattacccacaataatgcacattaactcatgttcatacattgctttttttccttctgaaaatcttgtagtcattctatgtttaatttccttcttctccagtctaacttaaaaaaatagaaatacaaattgagattgtttcataagataaaccccacctgggaaggtgttaaaaggacacaattcaaagaaaacctgaataaaattatatcaaccacgtaggattctttgaggtttccaaagaagatgtaccagtttacattcccacgagaggtatatgagttttggatggaatttttttttttctctctctctctctgtagattagtttttccctctactaatagtttctcttgacaaacagaagttcttaagtgacaatcattccatgtttctcccatttcagttagtgttttgtattttggtgtccactttaggaaatccttgcttacttcaaaatgatcatgttttcttacatttccttctaaaatctttatattttccacttttcatacttagactcacaatcgaactggaattaattctttgtaggtgatatgaggaagaggtcaagttctatttttccaaatgattattcaatttacccaatactatttaagtggtaatagtttcaccatcactcgataatatcacttttgtcataaatccgtcattatacatgtgtggccttttttctcggatctctattctgttacattggtctgttctgtcagttctcgcactgataatatgctgtcttactacagcttcatccttattcttaatatctggtagaataatttctcaagcttcgctcctttttatcaagtgttcttgagcactcttgacactttttttccatatacattttagaatcagcttgctaaattattcaggaaaaagataacaactgctgggattttttttgtttttgtttgtttccaactgatttaagtgcatcacagaacaaagctaaaaatattaatagaaatataaaaatatctaccacccaaaaatataaaatacaaaatatctggcatcaatcaaaaattacagacctgcaaagaagcatgaaaataggatctataaggaaaagaaggattaattaataggaaccaactcagaaatgacaaattggcagacaaagacagtcaaacagttactataactctggtctgtaagttcaaagttttgttgagatggggaaaggcataatgagatccaaacaaagcttctagagataaaaattacaatgtctgtgatgaaaaatacgctggatgaagttaccatcagattagacattacaggataaaatattaataaacttgaagaaataacacaaacaattcttaatgaaatacagagaataagtgggggtcatcagtaaactgggggacaactttaagtagcttaatatgtaattagagtcccaaaagcaaatttttaaacttgaatgaatttctttaaaggataattggctatttacactgaaataattccaaaacagtgcagggattctaatatatgcaaacataaatctataacaagactagcataaagacaggtgaggaataaatgaacacatatatcattggaaggtttccataatctgagtgaagtcacttgaaggcagactgcgttaaagtagagatgcaactgaaaatcatagagcaaccactaagatgacaaaacacagcattatagttaataagccaacacaatacagagttataaaaatgctcaaataatccataaaaacaacataaaaagaaaaaaggaatatagaagagatgggattgatagaaaacaaatagaagatgatagacccaaaagtaaccacatcaacaatcacatcaaatctaaatagtctaaaagcacagattgtactattgaatattatcgaatcatatcaaaaaaacaactatatgctgcttatcagaatactatgaagactcagaatgtaaaaaaatataaaagtatggaaaaagatgtactatgccaacaccaattaaaggaaagccagactagtaacgttaatatcaaacaaaataaatttcaagcagagaatatcatctgagataatgaaagtcatatcctaatgacaaaagtattggtctatcaagaggttgtaacaatcaaatatttacgtacctgaaaatggatcttcaaaatcccaaggcaaaaacagaactgcaaggagaaacagacaaatccacaattataatcagagatttcaatagccctcttttagtaactggtttaacaagttgacaaaaacaaaagacaactaaggatacagaagatatgaactacaccaacaaccaacttgacttaattgacgtttacagaacacttcatccaacagcagcagaatacatgttctcttggagtgcgcactgattgtgtgccagcatggactacgtacactgggccataaaacaagcatccatgcattaaaagtattcaagtcaaaccaagtgcactcgctggtcacagtgaaacttcattaaaaatcagtaagagaaagatttctggaaaagtcccgaatatttcaaaattagataatagttgtctaaataactcataaagcaaaaaataaatcaaaagataaaagataatttacaattattttaatagtatattttggtcattttttttttctttttgaccaaatactggtgagaatgaagataagtaagacctttcttttttattttttttttaagacggagtctcaatctgtcactgaggctggggtgcagtggcatggtgttggctcactgcaacctccgtctcctgggttcaagcaattctcctgcctcagcctcccaaatagctaggattacaggtgcccaccaccatgctcagctagtttttatatttttagcagtgacggggtttcatcatgttgggcagcctggtctcgaactcctgacctcaggtgatccacctgcctcggcctcccaaagtgctggggttacaggcataagccaccacgcctggcccaaatctttcttttttggggtgagagtaaattgtaaaaccgtttttgatgagtaatttagcagcatacatcaaaagagttaatactgctaacactccttgacccagagtgttttttatttaatgaatttatttcaaggaaattgctatatatgcataaaatgtttgagaatgttcaacagaaaagaaattattttaaactgaacaaatataaaaatatatcaaagttggtatgatgctgccaaagcaggactgaggggaaactgaagaacaggggataattttctattcattctgaggccagaactactctgataccaaaacgagactaagagattccaagaaagctgctgactaatatctctcaggaacacagattcaatgatccttttaccattacagcctagagaatctgacaatatgtaagagggatagtacaacatggtcaagtagggtttatctcagtaatgcattgttggtctgacattcaaaaaacagactatgtcatttaccttatctgtatgaaaaatatgaaaagtatatgatcatatctatagataacttaaacatttgataaaattccatatcctttcttgaagaaaactgttatcaaactcagagtaacaagaaattttcttcacctaaaaaaggacatttatgacatcctatggttaaatagaatatttttgcaagcaaactgataagtcaaagatgcatatgtaattcccagatcaaatactagaaacagcaaaaagaggataaaatagccttttcagcaaatggttctagaaaatgggataatatggaaaaataatgaatctctagccttatctcactccataaccagatgtgggcaaactatggcctccgggcaaatttggcctttgtctgttttcatacagcccagaaactaacaaaaattttacacttttaaatgattgaaaaaaagtaaaaagtattttgttacatataaaaatctaagatattcaaatttcagtaaacataaatgaagttctattggatcatggccacagtcattcgtgtatatattgtcaatggttgcttttgcactacaatgacagaattgagtagtcgagacaaatactgcatgatgcacaaaactaaaaaatttattatttcaccctttacaggaaaactgctgacccttcccataaacaaaatttagtaagagacacaaaaaaaatcccagataatcgaaaaactagaaactgaaagcttcctggaagaaaacatagcaagctctcttcatgatcatggggtaggcaaagatttcttaaggacaaaagaatgttctaaccataaaaaaagcaaattgttctttatgcaaatcccaaaaagttcttcaaaatacattacgaaaaaataaatgtatatctgagaaagggctggattcatattataaagaattcctacacatcaatcataaagaaggcaattcactaaaaacaaaaagttgactagagaattaaaaaaaaaagatatataagtaggcagtttcttttcatgagactaatgtgtttatttctccagacttagatgattgtttcactgatagcatgtcactgtcagctgcctccaggaattatctttggttaaagggaatgctttgcccaggtctcaccccattcctatggcagctggcatttaatgactggctgatatctcccttcctacaccattatttgatgaaatttaaaatttaaattaaaatgaaaaatttttctttcttgtttagaaagacatttgctttatgtctccctcaccaacctgtgcaaaatttgagtttgaggcaggtaaacctgaaatcagcaagagctgtgctgtgtcctgagagatcccgatggtctaatttaggaagcacccagtctccctagtcagggtccttagagcttcctcatagtgactacacactggccacttgggggcactgtggatccactgagtgggtcactgatagcgctgtctgagagagagagggttaagggagacagtcttgatttcgtctctgtatcagggatattaccagatgaaccagaggtactgctggcacaggaagagttaatcatagtcttatcagatcaactgatatgcaacgtgtatttgtcatgacaggaagccatgaactgaagccttgtgtggcctctctagcaacctaggtttgatggggagtgtgatgagggtttcagcagggcagcctggataacccaagccaggtggagataaaggagcatctgcctcagatgaaaatctcagaagctgtgcggatggctgtctgcccggaagcctgccccctctgctcagcacagctagcttcccctgctctgcaggaagctggacaggatgggggaaagcctgagttagctgagctagtcctggagtacagggtgcctatgggagcctacaggacgatgacatcagaacagtgacatcacagtaaaaacctccaaaaaacggtgaggaggagcaaaagccctgctttctcaccccaggagaccagcaacctgagcagggagatgcttagtcctgacctgcctgactctgcctggaacaccaggctcctctgccatgtcatgctttgtctcctgggagcaggtgagtcctgagtacaggtgggacatccctgtatccacagtgttcaattgttgctgaagtgtcaaactctcccgagctgagtcttcagcttctgtctccttcctccacagtttcagtggctgctggagtcatccagtccccaagacatctgatcaaagaaaagagggaaacagccactctgaaatgctatcctatccctagacacgacactgtctactggtaccagcagggtccaggtcaggacccccagttcctcatttcgttttatgaaaagatgcagagcgataaaggaagcatccctgatcgattctcagctcaacagttcagtgactatcattctgaactgaacatgagctccttggagctgggggactcagccctgtacttctgtgccagcagcttaggcacagaccctggagaattactggctttctgtacccaaaccctcctatctcacttgaggatgtaatagggagaaggaggtgggggctgccacacaactttagccaagccccagagatgcttctattcttttctaacattttcccctgccctgctgagctcagtgagagctcctgcacttgtgggctccagacccactggaagttctcacatcttagccagtactttttaattcctagcaagtggcgggagcttctactctgtgccaacataggggtatatgttttagtgtgtttcctgttgccatacagaatacctgagactgggtattttataaagaaatgaaatttgtttcttacagctctggaggctgggaagtccaaggtcaaggacccacatctagtgaggaccttcttgctggtgaggactctgcagagtcccaggtggcatagggcattacatatgagggggctcatgaaagatggtcaaactggcttttataacagacccaacctcataactaactaattccttctataacccattaatccatgaatggattaacctttatgagggcagagtccttaagatccagtcaccttccaaaggtcctacctctcaacgctgctgcattgggaaccaagttttcaatatataaattatttaggaacacagtcaaatcatagcagtacacattgcgggttttttttttttttcttttttgagacagggtctcactctgtcacccaggctgaagtgcagtggtgctgtgatcatggctcattgcaaccttgagcgcgtgggttcaagcaatcctcctgcctcagtggcctgagtagctatgactacagggacacatcactacaaggtgtgtccccagttcctcagttcctacaaggtgatgtgtccccttgcctggctaattttttttaatttttatttttgtagagatgaggccttgtcatgttgtccagattagtctcaaactcctcaaatgatcctcctgagtttatgtgttttaatgcaaagatagacattagcatatccactttatacatgtagaagatttcagtgtaccattttatagataggaagctgtggctcatgaacttctccagtatttcatatttccaaggatcaaaggcaggatccaaacctacgactccatgcctccaaaataaaatttctaaaattctatagtgtttcctgggccttggtcaatgagctacagcagagcactattcttccatctcaagactagccaagcagtagaagaaggtcacatattatggaatgtggttactatggcttatggcctgccaacctccaggacatataacttccagccagagaatatttgtcctgttttagttccatatagaatggggccacaatatgtcctaatatagacatatagtgacaaggggcatttctaatacatcacagggttcagtcaaggaaacagaatcctctaggaattccaaggagaataggagttaatacagggaattagtggttataaaccactggaaggctgaaaagtgggagggtctcagaaggttgaaacttgcgctcaggtccaccactagtgatcacaaagactgaagttgctacttttgcccaggtcagggactgctggaaatagctgagagtcatagtggtcttgcagtgaccaagagggtgattcacaggaaagtatccagaggtcattgcaaatccacctgtctgttgctgtcagataaaagtctttattctgcttctaacttttccacaagtatagcttactgggggaaacaaaactgttttcagaaacttgctctcaggagaatctaggaaatgtctttttcttttttttcttttttttttttttttttttgagatggagtctcgctcagtcgcccaggctggaatgcagtggcgcgatctcggctcactggaagctccacctcctgggttcatgccattctcctgcctcagcctcccgagtagctgggactacaggcacccgccactaagcccagctaattttttttgtatttttagtagagacggggtttcaccatgttagccaggatggtctcgatctcctgacctcatgatccacccatctcagcctcccaaagtgctgggattacaggcgtgagaccatgcctggactgggaaatgtactttcaagtcttctagctcttgcaataagagagagagagagattgttggaggacatttaagggtactcagtgccaaaagacaatcatcagcacacccagctatgcagcagagaaatggaaagcaggagaataaattttatattttctgtcaaattgttacatgaaaatttattttatatatatagctttgctgttgtcatttagttgttgtttacttgttaatttattcagtagatattcctggaatacctattatgttaaaaatttccttggaatacagaaaatgagatgtaatttttcaaattacacattctgtctttaagaagtctaaagtctggcaagataatatatccctaattattcacacatgcatttacaatgtatgaaagtcatttcaatcagtcagttttctggcaaggaacagatgacacagtcaaaaaggctgaagtgaaaacaatttaatcgaaggactatgtttagaggggtaaacagacttagggacaccaagaagtgtttgagggaccaggggtttccagcacattgggaagccagtacaactaactgtggggcctatggaaaaaggggtgggagggaaattctgtgttactggaggtgcatgcaagtaatgagaaaagtttcccaaaggaaggaattcaggaccagagctaggaaggggaagcccagatatgctgaactttctcttcactacccttcaatgtccagctggtgtcttccattggaaagcccagctgaaagcctggatagcaccgtttgctgacatcagtcttcaggggcacagtccagggcagtaaggggcaggcaggcgagagtcggttgtggggaactttgggtgtgcatgtagaacagccagcacagcagctaccaagtgtatgatgtgccatttgcagatgcatgtgcaagtacacggtggacagagaccaacttaattctacatcttttatgtgaacttagagaaaattgccttgttgattgctaataacaagcaacatcgttaatcccattttctctgggccatataccaagtacattatttcaattaatttcttaagaacttcaaaagggagaacaatttactcccatattacaggtaaaaaactgttagagaatttagattttctaaaggaggtacagctaacaaatatagaacttagactcacacctaggccatactgactttcaacctatgcttgaaggttactccaccctatacattttggtagaggaagataccttcaacattggaaatctaaatgtctcttttagaaacaatgcatctgacacaaaccatttgaataacatctttcatgtgggaggctgcacgctaaagaggaagatcctcagagatgaggagacctcagtagttcatcttctgatcccttgggtcagtgactttgaaaacatttggctaaactgaggccaatcatatatgtcttacagagattttatacatgtaaataaaacagagtctaatacatagtataggctcaataagtcttaggtccctatgaattttctgacaaatctctagtcaagcagttatttactttggcaatctggtaacaaaggcatacacgaattacttttgtctgattcacctatgattcagacacaaagtcatctaaaatgcaaatatagtagtctgataattcattggcaaaagtaacacaaacagttgtgtcttaagagaaagtgaaaatgttgtaccttacagcatttcctgcttgatactgagtctgatatgcaaggtgtgatgctcccagaaagttgtgaattcagagcaatcctgatggattccatctcctgttgctccagcacaaactcaatattgtacctttatcctggtttcctctctccctattttattctcccatctctcttattcctaattcctgagatcctttccaaaataaactactttcaccaaagtccatgtctcaaactttgccttcaggggcagcttaaaactttgacagtgatagaatgagatgaccctctaagacacttctctttgaaaaaggccgtggttttcttttagttacactgccatgcattcattcagaagtcctataatgatatatgaactatctcttccaagttcattttgactcagtctgagtttccaacagactcacatgggtctctgctcagttaaggctctgagcttatttgtaactgaatagactaagtttatgtttcacagcttcagggtctgcatggactcagagaaccattcatttctttcttcagtcattcaacaaaaatttaacaagagtatgtgcggagtagatccaagttttgcggaacatgaggcttataaaattttagggatcgctttgaaaaagagaatacaaaatgagaatgtcttgaaaaaattctgtgcaaggccaggcacagtggctcatgcctataatcccagcactttgggaggccgaggtggttggatcatttgaagtcaggagttcgaaatcagcctagccaacatggtgaaaccctgtctctactaaaaatacaaaaattagccaggcatggtggtgggcacctgtaatcccagctacttgggagactgaggcaggagaaccacttaagcccaggaagcggaggttgcagtgagcagagatcacgccattgtactccagcctgggtgacagagtgagactctatctcaaattaaaataaataaataaattctgtgcaagtgagaaggcctgaagttattcttcattgacttcatggcaaatccacttctagctagttaccgtgtgtaggcaccatgtaagtgcttgagaaacatcagcacagaaaacaggcaaaagctgcaaaataaggtgtatgttttcaacaaaagaaaattggtaaatcaataatgatcaagtaatacaaatgtaaatacaaggaaaatattcctggtagatgtttatctccccagagaagtcagagtattgttgagaattctattggtggatcacaccttatttattgatggatcacaccttattttgataacaattctcagagctcttggattccatgtgccctactctaaagaatctgagccctgagatggaaagctctcctttcctgtcctgactcaaccatgggcaatgatctctttttccgtgtgccttttggtctcccaggaccaggggagttctgggcatagatgggaaagctcttcctgggctttccaggccccagccacagcctctccatcggggtgttcatgggtcccctccctgtctccacttcagattctgtatccattctcactggagcatgagtgtaggaattacccacccaggttacatcaagatgtgcagtcacaaaaagggatcctcacactgagatgtgtcctgtatctgaaataacagtagtaccactattgactagatgtaaattttgcaccacagcacatttatggttcaatcaatatcctcccatttgtatttataagaccttctgaatggacacagggcatttccctatgaccttaaaggcaccaggctagtgtacttctgggcaaatatctcatatacatccctaatgagcttcctcttatttttacacaaaagaaaaaaaggagggtgggttttccccacatagtccatccactcacaagccaatctcctgcagaaataccctcacagatagaccaagaaatgctgttgtaccagctacctaggtatgccctagcctggtcaggttggcacctaaaattaaccatcacaaaactcatgagaacacagaggtctgagttctgatgatgagactcctattaggtgatggagactcaggtggcctcccctaaaacaaaaggagaagtcatatctgtattagtcatacatatgtgtatatgtacatacatgtatgtattctgttggttctgtttctctctgaggacgaggtggcctagatccttccctttctgggtaaagggtggaagcagtgtggatcattacttagtgtgttctgatagccatgtgtcactatgtacttgttctttgtgtcttcacatctcttcctgttgcattttaaagcattttcatagtatgtggtgttgcctagcagagcattctcatagcaaaaaaatgtatatatatatacatatgcatatatatattctattggttctgtttctctggagaaacggtatatatatatatatatatatatatatatatatactctccctgtatatatagtatatatatatatatatacactctctctctatatatagtatatatatatatactctctatatatatactctcctatatatagtatatatacactctcctatatatatagtatatatatatatacactctcctatatatatagtatatatatatacactctcctatatatatagtatatatatatacactctcctgtatatatagtatatatatatactctcctatatatatatatatatatatatatatatacacacactatatatatatatgggaagagagagagagaaaaagaaagaagagaagagaagagaagagaagagaagagaagagaagagaagagaagagaagggaagagaagagaaggaaagagattagggaaattggctcacgtgattatgaaggctgaaaagtcccccagtatgccagccatctgcaagctggagatgaagcaaagccagtagcatgactcagtccaagtttgaagccctcagaccacagaagccaatgttgtgtctctcagcctgagaccaaaagcctgacaacccaggggattgctagtgcaagtcccggaatccaaaggtaggagaatctagaattctgatatccaagggcagtagaagacacatgtctcatctctgagagagaatgcaaattcaccctttctgtgcctttttgtttcatccaggcccccagctgactggatattgccatacacattgagagtagatctttcccacacagttcatcaatttacaagccagtctcctccagaaataccctcacagacataccaagaagtgttgctgtaccagctatccaggtatgccttaatctagtcagattaacacctaaaattaaccatcaaactaccagcgggaacacacagaggtctgagctctgatgaggagtctcctgtgaggtgaactaatgtgacagggcataaaacaatatacaaattgtattgatcctgaccttaagactttttgaaaccttcccagatgtcaggtggctcttttaacagaggccagcactgtaggctgacatccagttatccagagtttgagaaaagataaaatctagtaaaaggtacttagaggcaaatttgaggagatgagttataaaggacaccagactgccacgagaatgtcccttagactacataaatattagaaacaattaaaacagcatataaatgaggaattgtatcctaatgggaataaaatatgcagagaggaatgcattttctttctaataacctgcaaagagcatatgcacttatgtctttaaaaatagtctacaaattattcccattctgagctgttaaattgtatatatgtcctataaaatattgttgtatataccataaattacatatatgtatatatttgatttatttttttggagaatgtaaggggtgtggcaggttaactttccagctcaactatttgtcaggggcactgatgtcatcgagtcactgagaacctaagttctatttccccaggcagggctgggagagatgagatcctggcctggacctgaaatgggcacaaggttgttcttctatgtggccctttgtctcctgtggacaggtgagggctggtcacaggtgggcttccttccctagaattcccaaggcctcaatacaagtctttttcttgggattacaacatcagggtctgttgttttctattacaggacacatggatgctggaatcacccagagcccaagacacaaggtcacagagacaggaacaccagtgactctgagatgtcaccagactgagaaccaccgctatatgtactggtatcgacaagacccggggcatgggctgaggctgatccattactcatatggtgttaaagatactgacaaaggagaagtctcagatggctatagtgtctctagatcaaagacagaggatttcctcctcactctggagtccgctaccagctcccagacatctgtgtacttctgtgccatcagtgagtccacagtgctgcatggctgcctcctctctgcacgtaaacagcagttagaaagactgaggttgctctgtgtctatccccacccttggaagtccaggcctccatagaagtcagagggccctggccagcctggaagccatagagcaggggccttatgaccctcagtgctgacgtccattcctaccccagtctcagaccaactggaggtcaccccaacacacttagcttgccaagtctctcttctgcagctctcttttgctgcttgcagaaaggaaaaggcatcattagttgaggttagcgatgattctcttaaccccaaagcctggactcccttctctcccctttgggcttcagtgacttcttcatctgcccctttccccagctccactatccttccactcatagtcatgaaccttcactcctgacctctgttcctggctgcctttcttctatgggccaatagcctcatggggccctctatcatttgctcttcacctacatctccatcatcattttgcacaagtctcccctggctctctctgctccagccatgctcctttatgttcagttatttcctcatatgtgttatgctgtttcccaccctggggatgtgtgtttttacagattatttcttctacactgaacatatgttcctccctcttattcctaagtctctacttcatttcttacatgaaagtatatttcaggtacatttactcttaactataaacagaaaaacttaaatttcactaaaagaaattaaggaaaatatttttatcctttgagtgaagacttttttagtggaaacacaaaagaacacatgccataaaaaaataatactggatgggcatggtggctcacacctttaattccagcactttgggaggcctaggcgggtggatcacttgagcccaggagttcaagaccagcctgggcaacatggcaaaacctcgtctctactaaaaacacataaattagctgggggtagtggcgtttgcctgtaatctcagctactctggaagctgaggcacgagaatcacttgaacttgggaggcggagggtgcagtgagccgagatggcaccactgcacttcagcctgggtgacagagcaaaactccatctcaaaaaataaaacaacaacaacaaactgacattagttgtattaatcatgtatcgaaacacatgataaaaaatgaaaagtcaagccacagcctggaaaaggcataaggaatgcatgcaaatgaggaagaatcagcatgacaccatttatgttcacaaaagtcccttggctcccctacagttccaggcttcacatgcagttaaagtgctgggaacatatgaagaggttctgaataactggatgtgtgcagaactgatgtgggcaatcccaagtctggcccttagaaataacttgtggcagccacgcgcggtggctcatgcctgtaatcccagcactttgggaggctgagatgggcggatcacaaggtcaggagattgagactatcctggccaacatggtgaaatcccgtctctgctaaaaatacaaaaattagctggatgtggtggtgtgtgcctgtagtcccagctacttgggaggctgaggcaggagaatcacttgaacccaggaggcggagactgcagtgagccaagattgcgctactgcactccagcctggcaacagtgtgagattctgtctcaaaaaaaaaaaaaaaaaaaaagaaataacttgtggcactgtgaagggagtcctcaagtagacacagaaattagctgcaaagactcatgggatatagcatacagttgcacttatggttaagatttattacagtgtcatagtaaatattcagcagcggatcatatgaagaaaacacacaggaggaatctagaggagttcacacattggcttccttatgctctcttcctcccgggaggggtcacacagagctcacttcttccagcaacaaaaatgcattaacacgtgtgcaatgtttctgcctgtggagctcatcagagactcaacaccccagaggctttagtggaggccagtcatggaggcactcactgcctagtatgaacccaaaatccacagcccagaaggaaatctcggtattcagcacaatactgtttgcaatatcagtctaggccacaatgagctactcctctcggttaggagaaactatgtcagtgcagggcactgctcaccagccagcttcccagatgtcagccaaatgccaacctcacaagcaggactttctaagcaccacagtctcaagccttgctgttgactgttttctgtacagatcccttcaattcttttgccatgccctaataaacctgggagctacgcaatacagattgactaatgataatatggaagcagcctggctcactgggtcataatttggtgaaaaaccatgaaagaaagctacttatggcctgctgggctttgtggacatgggaagtaagacttcatagaattaagccaatgagattttaagatttatttttatttttttttctgtagcatagctgttcttatctaatagagttagtatctacaatgggtaaagcattctcataacttactaagacaatccaataaaatggcaatacttagtctaaataggcatttcacagaaaagtaaacataaattaacactaacataaaaataggttcttgggctaggtgcagtggttcattcctgtaatcccagcactttgggaggctgaggtgggcagatcacttgaggtcaggggttcgagacaagcctggccaacatggtgagaccccatagctataaaaaatacaaaaaattagccagtcatggtgggatgtgcctgtggtcccagcagctactcgggagactgaggcacaagaatcacttgaacctgggaggcagaggttgcggtgagccaagatcaccccctgcactccagactgggtgacagagcaggactccgtcttaaaaaaaaaaaaaagaataggttcttaacctcacttagaatcagagtattccaatctgaaacagtaaattatgaatgcaaacttatcagattttgaagactggaaagtcttcaaagaaatgatagtcccaaatatgagaaaagatgtggactagtggaactgtattatactacagaagaaaattataactgatatggttttgttctgtgtcgccaccctcatctcaaattgtaatccccatgtgtcaagggagggaactggtgggaggtgattggatcatgggggtggttttccctgtgccgttctcctaatagcgagtgaattctcacagggcctgatggtttatgagtggcagttttcccttctctttctctgtcctgctgccatgtgagacgtgccttgcttcccttctccttctgccatgattgtaagtttcctgaggccttctcagccatgtggaactgtaagtcaaataaacctctttcctttataaattaaattacccagtccctggtatttcttcatagcagtgtgaaaacagactaatacaataattatatcagaaaaccctttctgagatatattctgacaagcaacattttgaaacaaattagcaatatagttgaccctctatatcagctgatttggaacccaaggataccaaaggctgacggtaaggaaggtgggcacccttggattaggatatcagcagggtttcctggaaccaatcccctcaggatactaagagatgactgtgtgtttaaattacttgagttcctttcattgtctttagggtccatcatggagaattgagttgtcaatatttattttagccattttgaaggttttaattgatatttaaaaattaacacttaaaaactgtggttatacatatatgtataaccatggttttacatatatatatataatatatagtatatacattaccacagttttatatataaatataaaatacatattaccacagtttttaaatgttaatttttaaatgttttatatgtacataaaacatacaatttttcaccttaacaattttaaaatatacaattaagtggaatcacgtacattcacaaggttgtagaaccatcactgctgtttccaaatgtttttcatgatctcaaagagaaactacacccattaagcaataactccatctttcccatgcttctcagcttctggtagcctctaatctaccgtttgtttatatgaatttaccaactctagatagttaattgatgggaaattataaaatatatctccctttgtgtctgtcttctttcacttagcctaatgctttcaagattcatccatattgtagcatgtgtcagaattttactcctttatatagctgaataatacttcatcgtgtgtatagaccacattttgtttatctcatcatcagctgatggacttgtgggttgtttccaccttttgactattataaataatcttgcaataaacactggcctacaagtatctgtctgctttcctgctttcaattattctgggtgtatacctaggggtggaattgctgagtcacatgggtattctacatttgacattttgagcaactgcccaacagtgttttacagcagcctcagcattttatattcccataacagtgtaaaagccttccagtttcttcacagccttgccaacacttaatttctgttttgttcttctttttaaaaattattacagccatgctggtaaatgcgaagtgatacctcattgcggttttgatttacatgttcctaataattaatgatgttaagcatctttttttgaacttttactttaaatttgaaaattgtattatgtatacttcaggtacataacatgatatgatgagatacacacctataggaaaatggttactatagtgaaacaaattaatatagccatcatctcacatagttacccatttactccctgtggcaataacagatataatttactcatttagaaaaaattctgaatatatgaactatagttttcatgtggcacattagatctttagacttcttcatcctgcctatctgctatcttgtatcatttggcctaaatgttcccatttcctattccctccccctgccatcctcccattaaccactatttcattctctctgtatatttgagtttttacaaatttcacatataaataatatacactatttctctgtgtctggcttatttcacttagcctaatgtcctccaggttcatctatgtttgttgtggtaaatggcaagatctcattttttttttaggatcaaataatactccattgtatatgtatgccacagtttcttcatccatttgtccatcagtagacacttaggttgtttccatatcttggctattgtaaataatgctgcaatgaacatgggagtgcagatgtctccaaaaggtgggatttcattttctttgtgtatataccaagaaaagagattgctgggtcatataattctatttttaatttctttaggaacatctacactaattttcttaatgagtgcatcaatctacttttccaccaacagtgtataaaagttcctttttctctacactcttgcaacttatctttttaataatagctatcttaatgggtgtgaggtgctatctcatagcagttttgattttcacttttctaacatttagtgatattgaacatcttggccatttttatgccttcttggtagaaatgtctgtttaggtcctttgctcagtttaaatagggttatatgttctcttgccaaagagttgtatggggtctttatatatttggtatattaatctcttatctgacatatggtttgcaaatattttttccaaatccataggttgccttttcatgttgttgattgtttaatttgctgtgcagaagcttttcagtttgatttagtcccatttatttttgcttttgtagcctgaactttttgtatgatatcgaagaaatcattgccaaggccaacgtcaaagagcttttccaacatgttgcatgtaataaactgaacttagatagaagacctaaacattagatattaagcatcttttcatatattattgatcatttgtatatcttcttaggaggcaatggcttttcttttccagttgttttttagtttttctttgtctttagattttagtagttttatgattgtaaggctaaatgaggttggggttgaacttcacttgggagatttgtcgctgttagtgtttttagtgcatattctgaaacatttttaatagactgtacaacagagaataagtaaattcattgacattactgggaaacagagttcttacaaagggaagagagatacaataagaaatagggaaagacaaggaagaaatctgtggtgtttatttgaattggaggtatcaaatatgaactattatttaaaaattatgtatttcctaactctaaccatacaatatgtaagaagcaatatgaagtcgatggacaattgctttatttctttgtacttgtgttcccagtagtaatgggcagaattattgcatgttatttaatttctaaatgtttctaaaagaaacaaagcagaaatggcttcttctagatccagagcagggaaagtcaaaaacatcttttggcagaaatcaaggaagtttcatgacccagaaaacatagaaaaaagccacagaaccagtttcatggggctcccactagccaaacacgagtatctaaacattagagcataataatgaggacactaaattataacaaattttaaaaatctataaggctataatgacaataaaaagatgtaggtaagaatgtcttcattacagaataatgctagttactaaatttcattagaaaatcaatgtagccattaatgtagttacagacagagaccatcagttgatgtcaaaaccaacatctgaaaggttattggagaccaagatatctatattgtgtcaaagtatcactccactaattgcttattaactataaaatataaatgatatctttgcaatggagagatctgatgtctgtgatgttaaatttagtatcgccaaaaatgtgtaaagacagcattatatgttcttgtaattgatcggatgcaatgggaaacacacatcaactatggcatggtatttgccaaaatatttaacctctgataatgtggaaattctgattgggggtcattttaccagtcagctgacatggactcttacaaaaatcaagaccatgaaagttggaaaatataagtgggccaaagagatgtctagtttaaaagtagctaaaaagacctgacaaccaaaagaaatgcataatctttgataatgtcctgtagaaaaaaaattaaaaccaaaagacacattggtacaactggagaaaggggaatgtgaagcatatatgagaaaataatgttatatgaatattaagtttttgagtgtaataaaggcatttgtggttttctaagataatggcctctttttaggagagacatactgaatcgttaagaataaagtgttttatttcagaaattgagggtaaaatacacaaaaagagataaagcaaatgtcaaaagatgttaataattgaaatacattttaatattctctttgttgtatgattcagctcttccaaaagtgtcagttttttaaataaaattagaagaaaaaaatcttaagatcttgaaatgttggcatgatttcagttttgtggtggctatttattatattcattttcaatatctttgaaatattctataattaccataaaacaaacacacaagataaggtttcttttagccctatagtgtactttttctatagggacaggctatgatttttaaaagtccccccaaaagataagagaatttatagtctgaggacaaaatagctgatatctctgagatgagcacaaaacttagctaacaatgcatgtcaagaagctgtttagtaaatacacaggactgttttaactgaaacaggagattctgagttccctacaggttggtcaagaactcacagatgttggggaattgcctgaatgtaagcagaggagtggtagtgcttgtcctaaattgtggttggataatatgtgtttgtgtaacagggagggggctctagcaggactgaaacactgtctgtggggaggagtctctagcaggacagaaggatcacatggagctggaatgaattcccttcagtcccccacaaacactgtctgatagtagccctgatctaatttccattgtttagaagtcccaccactctccctgagccatggctggagggcctaagcccagtggctctgaaccattggccatcaggaggcactgaggtttgatggcgtccaaatgtttttgaaacagggctaagtattgcctgagaagttgagtttaaaggaaaagtgtggcttcatcctagcattcagtatctagtttgcaggtgttttgagtggtcaatggaaactcatctttctccactgatgccagtgggttctgttcggcagtgaaatctgaactgtagcaaaccattgagtggagaatcttctgagcccacttgaggggtagatggaggagagccaggagccaacctgaatgctcacagacccatgcagaggaacaagtgcctccttgggagaacatcagagaaaccttagcacctaacctattctagtgtgtcctggacgatggacaggagaatgtaaggggaatgtagaagatgggagtggacaactgtagatgtttccagatatctcaaattgcagtaacaccacaaatattcttaacaagaaccagattttccagaactctggcatttccttccctgagcaatgagacggccctttgggccctgacacaatcatgggtgttttttgttcatttgttttggtgctcaggaagcaggggaggcatgagaatacctggggaatgtctttcctagaaataggatgccccaatttcaagtatttcacatgcagcttgataggtcctgtctccagccacccagcctccactctctcaatgctgttgtcatccagggccctaagctctggtcacacggacggaagaggtagtgacactgtgatgtgaagacactttccaccatgaaattattaattggtgtcaatataaggcaggctccgactagcagcttttctaccacaatgatagacaatttatatggaaaagagatggttctgataattctacactcacaggtcttcacctgataaccttgacatgtgtcccctaggttttaggaacttggatttctttaggctgagttgtactattccctttctctgaacacacatgtcattggttagttcattcatattgattctcagggcttctccaatccctcaagccttcccactctaccactcagataaggagaagtgtgtcttaactaatgttgcataattttttaaaaattgctggatactaacactgcaattcaattgtaaaatatgatagaggtgtaagtgttttagatcccagaagtcctgctcaattttgcatttattgttggatattcaccctgatattttcaggaattagagtgttcttcacccatttgggttaagatatcagaacttactttcaattcattggtgaccagagactacaggcagaatcatagtgaaggcttgatacataatacataatgaagattgataacagcaaaaagggaactagtcattggccttcagataaaatgaaacctcccaactttgtgctcagggaattattttacccctttaggttagagtatgtcagctagttcaatgcagttctaggataaagctgtgtcaattaccctagaggactgggagcatggaggacctggtagaaaagaaatacccaaagagaaggaaaattacacacaaaatcaagaggtcactaattgatatatctattttgagttgcctttgagacttccacgtagaaacatctagcacaggataggcctagagatgtagtgacagatctaatcccccaagccctgaatatgtgagtgaggacgcttggatgaacttccagtctatgaatacattaaacaaacttttagctctgttttagtttacaacaactgttttctaagaacttaagcatttgtggagacaatgatgtcactgtaggaacttctctgtaaggacagcaacatcccacttcctctgctcctgctcacagtgaccctgatctggcaaagcttccatcctgccctgaccctgccatgggtaccaggctcctctgctgggtggccttctgtctcctggtggaaggtgagtcctaggaacaccatgatcctcacataatctcccagtgattattctagtcatttccttctattttaaaattctttttcccccacagaactcatagaagctggagtggttcagtctcccagatataagattatagagaaaaaacagcctgtggctttttggtgcaatcctatttctggccacaataccctttactggtacctgcagaacttgggacagggcccggagcttctgattcgatatgagaatgaggaagcagtagacgattcacagttgcctaaggatcgattttctgcagagaggctcaaaggagtagactccactctcaagatccagcctgcagagcttggggactcggccgtgtatctctgtgccagcagcttagacacagtgtagcagagacacttccctcctgtgcagaaaaccgcaggactctctcctctctactcagctcacagcagcctttccttattcctcatcctcccaggaaagaagtgagttttcagatatagctaggattcatatagtgggaggaaatgaactatttcttacaacatgagcgctataattgttgcttgaaaatgtgtctcagggatttgaaacacttcttggggacaactcaagaaacctaaagtgacttatcagagattgagtcctcaggggtagtgatggtttatctcccataaaagtatgtgatcatgaaacatgtacaataaacttaataatacagatagtgattataccaagcagcaaacagcaggctccccttatgtagttgtcagcatgtgaatgacttgttacccttagtgacaccccggctgtctagcaaagtctcaacacacagtatgtgtttggaaatctttttccttctgttttatttttggtaaagtatgctaataatgatgttgttaatgatagtgattataatttcaggtatgttattcagccctttttccagttcaaagaaatgcacacaaatggataccccggcaaccaggtgcaaatcttagctccagatgaattctacttctcctgaactctctaactcttctatgtaatcatcccagcccaagaatatatctagacctggaccagtcagttcagaggacatttctacgtgtctgccttgtatattaaaagttccttagtggattgaaatattccttgtaagaacttctgaagcaatcaattgccctctctgataatatacactctgtgtgtctagctccatattcattactctacttctgcctaaactctctaatactagaaatctttctgaagtattggttagaattacttaaaaagcagcatactggaaattgtctgaaagcactgtcactgtccatttgcccctcctgacttccctcccctccttatccaatctaatacctgatggcaagtcaggctttatttccatttgttcattgcacatctccctgtcctttattcctgtaataaaacctcactgatgtgatggattaaaatgaccactcactcaccatctccttgtcaaaatttctatttttttcttttcccaatctgctatgttagttatagttaataactccctcataacattttctgagatcactttttattatttgaatataggacacacagttgtttcagagtctgtctgatcattttcacctctaagatcttcataggatatttttgtgattttctttttgtgctgcttctcagttatggtgcttgagttttcatggcatttgtatttctccttaccaatctgatgatgtttgacactttgccaaacactatagttgtagaaataattttgggggtaggatggatatttttctgcagagatcatttttctgtgcttctgaaagtgcatgtagatataaacagtcaggctccctgaatcacagtttaaggcttgaggtgtcctggagcatctggagaacaggtttgtctctggcttattgttactagtggaatttggcaatgacacgttcggtatgttctgggctttgctttacccccgtggcctgtgagtcagcttcctgagtgctgagtcaggatctgcaaatgcccgctagggcaaatggactgctgtgctcacctcccggagctcttgccctcaccaacattccagcccaattattattatttttttaggactttaactaaaatttttaatgttgtttttgatattttttttccaactatgtagataacaacagaaagagtgagtgccattatccttaattattgggattaaggtgaaaataactttacctggaattctaattttccttgtattttaatgttagattctttgtgatttgtctaatattcaacttaaatggtatagagatgttaaactctgatatcaaatactttaaaaaaacttatcaagaccattcataatccaattgagacatatctttgtttggggcatgttgtttttagagtattcttctactgttatttatttctatcacataacctctgtgttccattggaccatatggcaagatgggaaagacaatcaagagaatgctgagatctggtcaaatagtacagattgggcttcaaattaatttaattactgagttctgggggtggatttgtgctgttttatgagtatttcctggggcaatggtcaaaattagagggagtaactgatatgtggctattgttttaccccgtttaaagccaatctcctgggacaacacaccccattttgtggggcaccccgaaagtaataatcctgttttaatcttcctattccttgccaaatcttctctacagaagggaaatcagttatactatttcctctcttcattttagtttagtctctccttattttcccgttttcctcctggttccctagagaaaagtagattattttcaacatgtgctaagatcagtgaggaactctctcttccatgcagggtggcctgcagtttggaggggatagggaatgggttaaattctgtttcagcatcatgttagccagcccatcgagtttcacaatgagacctgctgcttatcagtattaaaactgacattatgtttccacctttctgactgcattgtcaatgtctggggtgtttctgtcctaccccatagcactaatattatttgttggccttttaacaccaactaatcataatatcctatatcccttgtactcagtgaaataaagctcaagtccctgtgtcctggcaaaagagagcacatttgtgctgttctgcctactggccactaggaggcactgtggcttcgatgtcatccagagtctatggggaggagctgagattgctccctggaagatggttaagaataaccccgaggttggacctaaattcagggagttggtttgcagatgtcttgaatgatggctgggaataaaggaattagtaaccgacgcttcctccattgtagaggtgggttttgctttaaattgtgctttgagtggggctgagtgacaggtgtactttgcagtgcatatacctctgagctcgcttaagatgtaggggcacaaggagctgaggtggtgcagggcccatgttctgagcttggaaaaccagagaagcagttcttgtgtcaaaggagccttggagagcctggccccaaaccagcccaggccaaccctacctgctctgtgagagtagaacagcaagaaagggaggtgctacccaggaccacagcagagggaccctgtcgccagggagatgaaaatcacagtgatgccacgaccatatccacgtatgaggcatagtccagtgtgtctcctggaagaagatgaagcctgggcagacataagaatatgtttttgaataggcttcccttggcctgattttaaattccttccatgtgatcatgcatctgtctgtacctgtattttgtacccggcttctgcctctcacccatcagtcccatggctactagaaggtattaaatttctattgacaaaaattaccactaatttggtggcttacaacaataaaaatttattatcttacagttctggaggttagaagtccaaaaccaggctaaaatccaggtattggcagggctacattccttcccgaggctctcagggagaactatttttctctcctattcagcttctagaggccaccagtgttccttggctcatggccccattcaatcttcaaagccaacaaggactgggtgagcctttgctcactctgcatcactctgacactcactcttcatcctccctcttccacattttaggacccttgtgattacattgggcccatctggaaaatccaggacacgctccccatattaaggccagctgattagcaaccttcattccatttggaacattcgtttctccccttgccacataatttaacacattcccagtttctgggaattagacatgtacatctttgagaggtcgtcacgctgcctgccacacttgctacctggttacacgaagtagtaagcaattaactttttgaaggcagaattatggccatagttttatatcctggatccaacagaccctgcaaaaggatagagcccacatggaaatagcccctccagtaacacaagctagtctgcaaactaatgcccttttactttgggaagtgcttttgactgcaggggactcagaagcatgcctctgtgccaacagcaaaaatgtgcccttctcttttgttggcaagtaacttaaccaaccaacccaaaaaaaagatctttctctcagctttccataatctctgagacgaagtaggtttggagaagtggggttacaggggaaaaagccaggtgttaatgatgaaaaaacattgaacttttctaggggtagtaataagatttaattcaagactagaacattttagctgcaaatcttcaagaataagacaatattatcccctttctgttttattgtgggactagagaatgtgagagaggttacattccatgggctttgggaatttaatatggttcaaggataaacacacccaggtttttcactgcagagaagagcttcaaatataatcagttttcaggtcatcagctcagctcttgtatccctaacaatgcagttgacatgcgtcttctcagatgtctaactcctaactcactgagggatactttaagtacatataaaggactagaagcaccaagctaccagtgagaggaagaggagagtttgcagagaagctggcttgaaataagacaatgagttcatctttaaatacttgccatttgaggtgcagatggatatagttggcaggctcctatgtaaggcatgttatggagaagctaccgtgaattgataatatcaaaacaaatatccagggagcctctgcaagtgtgcatctctatttcacaccaattatagttgagttaattcctgcctgattcatctcccagagatgcagcctcctcttaaagaagttgggggtggtggcccattcagtgatgtcactgacagatgcattctgtggggataaaatgtcacaaaattcatttctttgctcatgctcacagagggcctggtctagaatattccacatctgctctcactctgccatggactcctggaccttctgctgtgtgtccctttgcatcctggtagcgagtgagtcttcagaatatttgccatcatcaggctgggcttctgcatggatgatctcatatattttccttattctgacgcccaattctgtcttctttcatagagcatacagatgctggagttatccagtcaccccgccatgaggtgacagagatgggacaagaagtgactctgagatgtaaaccaatttcaggccacaactcccttttctggtacagacagaccatgatgcggggactggagttgctcatttactttaacaacaacgttccgatagatgattcagggatgcccgaggatcgattctcagctaagatgcctaatgcatcattctccactctgaagatccagccctcagaacccagggactcagctgtgtacttctgtgccagcagtttagccacagcgctgcagaatcacccctttcctgtgcagaaaacccggtgtttccccttctccttctacctcccagcagtcctgggcaaagtctctgctgttcctccctccctatgagaaaaaagtggtttgggggtatgaaaaagacagaaaatgagaagggatcaacataggaaaccttatgttggtttgaggattacaaaatgggttttgaggattccttaaaaattgtctctgctcaaaacacataggagtaagataaaccttggctactgacactggagatttccctgccctcctgcatttgccatcccatgagaatggtgggggctcttgagaagggctgcattttctgaactgtgaggccctcttcattctctcctaactctaagctgcaaacagaaatttccctcacacgttttctagattgtaaaagaaagttcttctttactatgattgtggacgttcctttataatgccaatttcaactttacattacttcaggatttttcactactcctaaagagtgtctcaaatgtggctagagcaagcaggttagtacactagatgtaagctacctggcctggaatctaaggatccatttgtctctgttctgcgtaagatgagccgggtgctggccaaaggctgtgcacactcacagagcactgatgacgcctcctggtaaggacccacactggggtatctaaaagcagacaggcatgtccagtcttctgttgccctgtttcctttctgattatatgtccttaacacacaaatttacattttccttcttatttatatgagaagtttctatacaatacctgcaatccattctgagtggttataatttctgtgtgatattcatatttacatgctgattccttctaaatacctatcatggtatcattgacaactgaggcaaaagacccctatattttgagtgcccaaggccattgaggttttttggagctctgccataagcccaattccactgtgtcattttcctatttttctttccttttttgttttttgattagtgggtcctgactttcaagatgaaaatagtgcagaattcctccctgctgcttccagatcattttccttcctacttctctaaagcccagctgcattataggcttcctttagcctgattttaaattccttccatgtgatcatgcatctgtctctacctgtatcttgtatctggcttctgcctcttacccatcaatcccatggctactagaaggtattcaatctctgttgacacaaattactactaacttggtggtttacaacaaaaactaattatcttacagttctgcaggtcagaagtccaaaaccgggataaaatccaggtgttggcagggctgcattccatcctgaggctctcggggagaactgtttttctctccttttcaacttctagaggccaccagtgttccttggctcatggccccattcgatcttcaaagtcaacaaggactggctgagctttgctcactctgcatcactctgacactcactcttcgtcccccctcttccacattttaggacacttgtgattacattgggcccacctggaaaatccaggatacactccctatattaaggccagctgactagcaaccttcattccatttggaacattcctttctccccttgccacataatttaacacattccagtttctggaattagacatggacatctttgggaggttgtcatgctgcctgccacacttggtacctggttacaggagtggtaagtaattaaattttttaaaacagaattatgaccacagttttgtatcctgggtccaacagacctgcaaaaggatagagcccaaaggaaataggccctccagaaacacaagctagtctgcaaactaatgccctttaacattggcaagtgctttcaactgcatgggactcagaagcatgcctctgtgccaagagcaaaaatatgcccttttatggcaagtaagttaattgatcaactcaaaaaacaaacatttctctcagctttccagaacctctgagaggaagtaggtttggagaagtgggattaaggggttggcagggggcggagaaaggtcaacaggggaaaaagccaggtgttaatgatgaaaaaacattgaacttttcttttctaggggtagtaataagatataattcaagactagaacattgtagctgcaaatcttcaaaataagacaatcttatcctctgttttattgagggaatagagaatggagagaagttccattccacgggctttgggaattcaatatggttcaaggataaataaacccaggtttttttactgcagagaagagcttcaaatataatcagttctcagggcatcagctcagttcctctatccctaacaatgcagttgacatgcatcttctcagatgcctaactcctaactcgctgatggataatttaggtacacatagaggactagaaacaccaagccaccagtgagaggaagaggagagtttgcagagaagctggcttgcaataagacaatgagttcatctttaattacctggaatttgaggagatgtatatagttggcaagctcctaggtaaggcatgttatggagaagctaccgtgaattgataatatcaaaataactattcagggagcctttgcatgtgtgcatctctctttcacaccaattatagttgagttaattcctgtctgattcatctcccagagatgcagcctcctcttaaagaagttgggggtggtggcccattcagtgatgtcactgacagatgcattctgtggggataaaatgtcacaaaattcatttctttgctcatgttcacagagggcctggtctggaatattccacatctgctctcactctgccatggactcctggaccctctgctgtgtgtccctttgcatcctggtagcaagtgagtcttcagaacatttaccatcatcaggctgggcttctgcatggatgatctcatatattttccttattctgacgcccaattctgtcttccttcatagagcacacagatgctggagttatccagtcaccccggcacgaggtgacagagatgggacaagaagtgactctgagatgtaaaccaatttcaggacacgactaccttttctggtacagacagaccatgatgcggggactggagttgctcatttactttaacaacaacgttccgatagatgattcagggatgcccgaggatcgattctcagctaagatgcctaatgcatcattctccactctgaagatccagccctcagaacccagggactcagctgtgtacttctgtgccagcagtttagccacagcgctgcagaatcacccctttcctgtgcagaaaccctggtgtttctccttctccttctacctcccagcagtcctgggcaaagtctttcctgttcctccctccccatgagaaaaagtggttttgggttgtgacaaagacagaaaatgaggtttcaacataggaaaccttatgttgatttgaggattatgaaatgggttttgaggattccttaaaaaattgtctctgctcaaaacacataggagtaagataaaccttggctactgacactggagatttccctgccctcctgcatttgccatcccatgagaatggtgggggctcttgagaagggctgcattttctgaactgtgaggccctcttcattctctcctaactctaagctgcaaacagaaatttccctcacacgttttctagattgtaaaagaaagttcttctttactatgattgtggacattcctttataatgccaatttcaactttacattacttcaggatttttcactactcctaaagagtgtctcaaatgtggctagagcaagcaggttagtacactagatgtaagctacctggcctggaatctaaggatccatttgtctctgttctgcgtaagatgagccgggtgctggccaaaggctgtagcacactcacagagcactgatgacgcctcctggtaaggacccacactggggtatctaaaagcagacaggcatgtccagtcttctgttgccctgtttcctttctgattacatgtccttaacacacaaatttacatttttcttcttatttatatgagaagtttctatacaatacctgcaatccattctgagtggttataatttctgtgtgatattcatatttacatactgattccttctaaatacctatcatggtatcattgacaagtgaggcgaatgatccctgtattttgagtgcccaaggcacttgaggttttttggagttctgccatatgccaaattccactttgtcattttcccattttttttttttttttacgtgtagggatcctgacttttaagatgaaaatagtgcagaattcctccctgtgcttccagatcattttctccctcctactttaaagcccagctgctttgtacatattactttataatattaccccttctcattgtacctaccttattaccttcagaaattttcttttttttaatccttctgcctgctactaatccagtcatcattcttaatactattcatcacatagacaatttattcactcgcgaggcttctaagtttctcgacttcctatatcctgagtctttttcccctctaatcattttcagacttgtttccatgattatagaccattaaggaacaacaaagatctttcaatatttctatttaaattgtcctgtcgttctaccactacctcccttctgtctatatcagtaactcctacaattcttctatttctctgacctctccagttcatagagcccataacttttatttttttaatttttttttggtctttctaggatgttatttattaaaaatagattctctgtccctaccctcacccctgctggcaaaatggcctttcccaacatcttttcctgcatggataacaggtcttgaggacgcagatgtgcatcctacctaaactacaggctcaggcttttctgggacagtgaggcagcagctctgccagagccaagggtggaacagcacaagacgacatcagcaaaccctggtgcacctaactgtgggctgctatggagtctgggatggactggagttcctcctgctccaggcctcgggagacaaaatccacaaagagagacccagtggcccagcagcagccccctgagagcccacaactttttaactcttacgctttaattcttacattcttttaattatattttaagatttaagactataatatcaaccccgattaaagccaactccccgtaggttcctatgaatggcagagttgggaggggcactaaaaaatccccgtgggaactcattcgatttatcttctgtagttgtcatagactcctcttaggttcctctacttctaatcttggcctccctcattctagccaccaacccagggtctactctcaatacagaagtcagagtgatcctttaggttagatgttgtcactcgtccactaaaccatacagtagattcccgtttcactcagagaaaagcctacagcctgcataggcctacgaggtcctcggtgatccccctccctgttgtatttcttgcctcctgtctgttcctctttcccttgcttattttttcacaacacagtggctttctggccattcctcgaatacacaaggcacacttctgccttagaacctttgctcaagctattccctttgcttggaacatccttctcccaagtatcccagtcaggcctgcaagaagcctgaattattctaccagtgacacaatcattttcctaaaaccacttttcaatttttatacattcaacaattctccattgttcaccagataaaaatgtcacctcgggagggcatttgaattttaaaacatttggaccatatcttatcttatttttgactactgagtaagataaatgttactttatcaagtgcacttcatacccttacaaaacagtcttacacaatttaatgcctgttcatacatttgttcttgcaatttctgctaccttcttcatattgttcaatacttctagtcactcaagacactactgaatgcttctttctctatgaagcaggaaatggttctatatactctattttcacagtggagtaaaatagatacacattttaggaacaaaacaaccatgcagattatagaaattaaactattttttacatactttcgaaggtgaggaagttcagaagctcaaatatggttaagatatgttttgcttctatttaagtccacattccccaccactttaaatcttccaagaaagatttccctcattcaaattaaaaacattttgatacaagactgggggcagggaagtgctgggtagagaagggcggggtccctggtgagggctccaccctcgggcctgtgcccacagacctaaatgaggacaggcgtttctgtttttgcactcaaaaagttgccttttggcccgccacgcctcccatcctgtgcccatataaacccgagaccttaagcggacacggacacaagaggctggacatctagaagagcagaagaatacagcagcagacaccggcagatcagcgatggcggaaggacacgaatgcgaggggagttcagccaggggaagtctgcgagagtcctgccactgggcagccaactgcaggggaaaaccaccgttccactccatccctcgacttctggctccccatctatctcactgagagccacttacaccacttaataaaagcttgcactcaacctttcagcccacatatgatctgattcttccagtacactggtcaagagctcaggctgtcacattggccccctgtccttgcaataagcagagggtctattgagttgactaatgcaacgagacggcagacggcatagctgaaagagtgcactgtaagtcctagacgctgccatcccttggagcccaaaagcactccccatggcctctgcacctgcccgtctgcatgctcccctaggggtttgagcactggggcaccagtgaagtgagccatccccctgtcacatgtcctgcgaggagaataagggaattctccggttttaacttaatctgtaaaagaccttgttaagaggatgaaaaagaagccacagcaatggataaaacatttgtaaactacatatccaacaaaggaatattatgactgtttcgagatttgcagaactgtctatttaacccatagactcatgagcaataataaattattattgctttaaccagtgagatttgagtgaggcttgttatacagcattactgtgcaggtgtcaattgatatactctatattgcaatatcgattcttaaattgtctaaccataatcctatagaccattactaattccaagcttgttctttttatgaagagtgtcgctcaactctgatgtctttgttctgtttaatattttgatttacacatgaacacagttcccagcagctttcaaacctccagaagcccttaacatttctgattctgaaaaatatcttttcttgttttcagcattttttattgttattttttattcttttgtatgggaaggtactcagtttaccatcctgaattagtaattctttaaacatttttgcaattccagtaattagagatattactgcattaggcattgaagataccatggtctttgcatttcctgcttgcatatcgagtcctatgaactatttctggtgtctctgagtcacttcccagtgtggtcattggcttttactgagtctgattcaccgacctttactgagcctcactcaccaacctttggtcattcttggacatagaagcacaaattcaacagtgttgtttcccaaaatatgtaatatgcagggaaaattacttttcatgtaaaatagacgtgtccttttagtattaccagtagattattctaattatagactagtaacatccaacagacttatttgggtttagtgacagacctattactgtgttcgctcctcagttcaaatacagagtgtgtattttgcatcgtgtggctgcaagttttggggttctccatcatatacttagctatacaatgccagctactcttgtctggatattttcccaaatcctggatgattacaaacttctccttcactggtgaaattttttttttttttttttttttgagatggagttttgctcttgttgtccaggctggagtgcaatggcacaatcttggctcactgcaacctctgcctcccaagttcaagtgattctcctgcctcagccttctgagtagctgggattacaggaatgtgccaccatgcccggctaatttttttttttttttttagtagagacagggtttctccatgtttgtcaggctggtctccaactcccgacctcaggtgatccacctgctttggcatcccaaagtgctgggattacaggcatgagccacagtgcctggccaatttttttttttttaatgaagggtcaaacctgatattaagtctttcagacagtaagaagataactattcagggtctacaagatggccaattagaagcagctgtggtccatggcactcagggagaggaatgaaacggggtgagtgaatttagcactgtcaattgagatattcaggttctcacactgggactgtctaggcaaacaactcaacccacagagaacaaagaaaagcagggggtgtggggcatgatggcccaccaggagcagcacagagccaaaggaacccccacccccagccaaaggaagcagtgagtgattgtgtgaccctgcccaggaaacgactcttctcccacagatctttgcaacacatggatcaggagatcccctcacaagcccacaacaacagggccttggatccagtacacagagctgcatggagtcttagcagagcagctgctcaggcacacacagagacccaggagttttacacattccagcctcaggatccccagcaaggcaggaaatctgtccacatataaccctaggaagggagctgaatccagggagccaagcagcatcattctgcaggccccacttccatagcacctcacaagttaagacgcactggcttggaattccagatagccaatagcaacagcctagaatctgcctgagataagtatgaattcctggggaaagggggtggccaccatctctgcagtccagtagacttagctgtttaagcctgccagctttggagaatacaaatggtctggatgaggaaaggttccccataatcagcacagctgccttgccagatcatggccagactgcttctttaagcaggaccttgatccatcccttctcagtgggcaggacctccctgtggaggcttcagccattctagccagtgttctacattgagagctctgatctctccctaggatggagctcctggcagggaggggcagcctccatctctgcagttcagtcaactcagtccttctagcctgttggctttgcagaatcccaaaatggtctggacgagaaagcctcctcataatgcagcacatttgctctaccaaaaagcagacagactgcttctttaatcaggcccctgatcctgttcatcccaactggatgagacctcccaacagggtctccagccacctcctacaggtgtgttctggccagcaacaggtcagtaccccccagggatggagcttccagaggaagaagctggctgccatctttgctgtttcacagccttcactgatgatacctccagtatgggaaaaaccgaggcaactaaggtctggagcggacttccagcaaaccacagcagccctacaataaagtggcctgactagtaaaggaaaaacaaaaaacagaaaacaacaagaacagtatcaatgaaaaggaccccacaaaatccaaggtcaaaggtcagcaagctcaaagattgaaggtagataagcccacaaaaatgagaaagaatcaacacaaaaatgttgaaaacttaaaaagcaagagtgccttttctcctccaaatgactgtaacacctctccagcaatggcacagaattgagctgaggctgaaatggctgaattgacagaagtagggttcagaaggtggtaataatgaactttgctgagctaaagaagcatgttgtaatccaatgcaaagaagctaagaatcatgataaaacaatacaggagctgacagccagaataaccagtttacagaggaacatgatcaacctaatggagctgaaaaatacaacacaagaccttcacaatgcaattacaagtatcagtgggagaacagaccaagtggaagaaggaatctcagagtctgaacactatctctcttaaataagaggggcagacaagaatagagggaaaagaatgaacaacaccccccagaaatttgggattatgtaaagagactgaacccatgactgactggggtacctaaaagagataaggataatggagtcaaattggaaaacatacttcaggatatgatccagaagatctttcccaacctagcaagacacaccaacattcaaattcaggaaatgcagagaaccccagtaagatactccatgagaagataaaccccaagacacataatcatcggattctccaaagttgaaatgaaaaaaaaatgttaagggcagccagagagaatggccaggccacctacaaacggaagcccatcagactaacagcagacctgtccgtggaaaccttataaagtacagtggttggaagctattctttaacattcttaaagaaaagaatctccaacccagaatttcatatctgaccaaactagcttcgtaagtgaagaagaaatacgatccttttcagacagcaaacacttaggaatttgtaccacaggactgccttgcaagagctcctctaggaagcactaaatatggaaagaagaaaaccattaccagccctacaaagcacactgaaatacacagaccagcaacactatgaagcaaccacataaacaagtctgtgaaataaccaggtagcatagtaatgacaggatccaacttacccataacaatactaacttttaagtgtaaacagggtaaatgccacaattaaaagatatagaattgcaagctgagtaaagaaccaagactcactgatatgctgtctttaggagacacatctcacatgcaaagacaaacataggctcaaaataaacggatggaagaaattttaccaaccaaatggaaaacagaaaaaagcaggggttgcaatcttagtttctgacaaaacagactttaaaccaacaaagaacaaaaaagacaaagaagggcattatataacggtaaagggttccattcaacaggaagagctagctatcctaaatatatatgcacccaatacaggagcacccagattcataaagcaagttcttagagacctacaaagagagacctggactcccacacaaaaatagtgggagactttaacaccccactgacagtattagaaacatcactgagaccaaaaactaacaaatatattcaggacccaaattcagctctggattaagtggaactgatagatatccatagaattcttcacctgaaaacatcagaatatacactcttctcatcatcatatggctgttgctcaaatcgatcacatatttggaagtaaaacattcctcagcaaatgcaaaacaactgaaatcatgacagtctctcagatcacagttcaatcaaattagaactcaagatcaagaaattcacttaaaccacacaactacatggaaattgaacaacctgctcctgaatgactcttggataaataacaaaattaaggcagaaatcaagaagttatttgaaactaatgagaacaaagagacaatgtaccagaatctctgggacagataaatcagtgttaagagggaaatgtattgcactaaaggcccactacaaacctctgctcaaagaaatgagagaagatacaaacaaatgaagaaacattccatgctcatgggtaggaagaatcaatattgtgaaaatagccatactgtacaaagtaacttatagattcaatgctattcccattaaactaccattgacgttcttcacagaattaggaaaaaaaactattttaaaattcatatggaaccaaaaaagagcctgaatagaaatagacaagacaatcataagcaaaaggaacaaagctagaggaatcatgctaccagacttcaaactatactttaaggctacaataaccaaaacagaatggtgctggtacaagagcagacacatagaccaatggaacagaatagagaactcagaaataatacgacacacctacaaccatctgatcttcaacaaacctgacaaaacaagcaatggggaaaggacttcctatttactaaatggtgttgggagagttggctagccaaatgcagaaaattgaaactggactccttccttacaccatatacaaaaattaactcaagatggattaaagacttacatgtaaaacccgaaactatgaacaccctagaagaaaacgtaggcaatctcatttaggacataggcacaggcaaagatttcatgacgaacatgccaaaagcaattgcaacaaaagcaaaaattgacaaatgcaatctaattaaactaaagagattctgcacagcaaaataaactatcatcagagtaaacagacaccctgtagaataggagaaattttttttgcaatctatctatctgaaaaaggtctaatatccagagtctgcaaggaacttaaacttacaacaaaaaaacaaccagacaaccccattaaaaagtaggcaaaggacgtgaacagacacttatcaaaagaagacatacatgtggccaagaaacatttaaaaaatagctcaacatcactgatcattagagaaatgtaaatcaaaccacaatgagattccatctcatgacagccagaatggctattataagagtcaaaaaacaatggatgctggtaaggttgcagagaaaaaggaacacttttacactgttgtgggagtgtaaatgagttaaaccactgtggaagacagtgtggtgattcctcaaaggcctagaggcagaaataccacttgacctagcaattctattatggggtacatacccaaaggaatataaatcattctattataaagatacatgcatgtgtatgttcattgcagcactgttcaccatagcaaagacatggaatcaacctaaatgcccatcagtgatagactggataaagaaaatgtggtgcatacaacatggaattatatgttggcataaaaagaaatgagatcaggctgggcacggtggctcatgcctgtaatcccagcactttgggaggccgaggtaggcagatcacgaggtcaggagattgagaccatcctagctaacacagtgaaaccccatctctactaaaaagacaaaaaattagctgagcgtggtggcgggcacctgtagtcccagctactcgggaggctgaggcaggagaatggcatgaacccgggaggcgaagcttgcagtgagctgagatcgtgccactgcactccagcctggatgacagagcaagactccatctcaaaaaataaataaataaataaataaataaataaataaatagaaatgagatcatgtcctttgcagggaaatggatagagttggaagccattacactcagcaaactaatgggaacagaaacccaaacactgcatgttctcacttataagagggagctgaatggtaagaacacatggacacatcacagggaacaagacacactagggcctgtcagaagacggttagtgggagggagagcatgaggcaagaaaaggtaatgaatgctggcttgatacctgggtgatgggatgatctgtgcagcaaaccaccatagcacatgtttacctatgtaacaaacctgcacttcctgcacaggtgccctggaacttaaaataaaagtcgaagagctccctctccctctccctctccctctccctccccctccccctccccctccccctgcctctgcctctgcctctgcctctctgtctcccctttccacggtctccctctgatgcggagctgaggctggactgtactgccgccatctcggctcactgcaacctccctgcctgattctcctgcctcagcctgccgagtgcctgggattgcaggtgcgcgccaccacgcctgactggtttttgtattttttggtggagacggggtttcgctgtgttggccgggctggtctccagctcctgaccgcgagtgatctgcctgcctcggcctcccgaggtgccgggattgcagacggagtcttgctcactcagtgctcaatcttgcccaggctggagtgcagtggtgtgatctcggctagctacaacctccaacctcccagccgcctaccttggcctcccaaagtgccgagattgcagcctctgcccggccgccaccccgtctgggaagtgaggagcgtctctgcctggccgcccatcctctgggatgtgagaagcccctctgcccggccgcccagtctgggaagtgaggagtgcctcttcccggccgtcatcccgtctaggaagtgaggagcgtctctgcccggccgcccatcgtctgagatgtggggagcgcctctgccccgccgccccgtctgggatgtggggagcgcctctgcccggccacgaccccgtctgggaagtgaggagccctctgcccagccgccaccccgtctggaggtgtacccaacagctgattgagaacgggccatgatgacgatggaggttttgtcgaatagaaaagggggaaatgtagggaaaagaaagagagatcagattgttactgtgtctgtgtggaaagaagtagacatgggagactccattttgttctgcactaagaaaaattcttctgccttgggatgctgttaatctataaccttacccccaaccccctgctctctgaaacatgtcttgtgtccactaagggttaaatggattaagggcggtgcaaaatgtgctttgttaaactgatgcttgaaggcagcatgctccttaagagtcatcaccaactccctaatctcaagtacccagggacacaaaaaccgcggaaggccgcagggtcctctgcctaggaaaccagagacccttgttcacatgtttatctgctgaccttccctccactattgtcctatgaccctgccaaatccccctctccgagaaacacccaagaatgatcaataaatactataaaaaaaataaaaaataaaaaaaataaagttgaatcaaagaaaaaaaaagtcgaagaaaaaaaaagaagataaccatttgaattgcctcatcaggtggcttgttatgggagaatgtatatttccaagactcttgaaattaaagagagtgagctatcataaacagtgagctcctagacagaaataatttagagtatgtgatagtaagcacacctgtcaaggctctctcctttgaagaaaatgtaatgaggaggactctgaaagaaattagagcatgtacacacaaagattcaaaatcaatcaacattattattacaaaagctgagagcagaattaaaagaatgcctgtgcttggaatacttgttatggagaattttaatttgctaagaaaatggatgagacactacagtattttgaagtgatacttccttctgatcatcagaacaggagcaaaggaagaatatttaaaattgaaagcttttatataattcttactgtgttttgggcatttcaagtgggttcattttccaagtagaaaatattcagcatctacttagaatgccttattttatggaagagtaaactgaagtagagagaagatacataattttcttcatgtcacatggctagtaaatggaggaaagagggattcaaacacaagaatttggggactggattccttttaaccatttataaactattataaccaaaattaaaaatataggttcattaaaatggaagaggaacaagacttccttaggaatagttctaacttcttagaagacatatttctcatatgaaagaaagaggaggttctcggccgggtgtggtggctcacacctgtaatctcagcactctgggaatttgaggcaggcggatcacttgagctcaggagtttgagacaagcctcggcaacatagtgagatcccatcactactaaaaataaaaaaaaattatctggggattggtggtgcatgcctgtggtcccagctactcgggaggctgaggtgggaaaatcacttgagcctagggggtaggggttgcagtgagccaagagcatgctactgtattccagcctaggtgacagagtgagacctcacccccaattaaaaaaaaaaagaaagaaaagaaaagaaagaaagaagaggctctcatatccaggaaagatcaattttagagggaagaggaaatgcactcagggtcaactgctctcaaggagttattagaagagatttattttggttgttactaaggcaggcaagataactggatgtaaagaatcttcatggaggaaaaacaaagatacaggatctcagaggggagactagataaactttacagaggaagacaggatttggggatttgttaaggaatgacttaaaatcaacactatataaagggttatatgcaatttggacatttttgagaagagatgccctgagacatcaattgaagactctcaaattatttgatgttcagctctagcctgtgcttgaaaggagcctgcttaattatttttaaaattatgagtcttaagaaagtgtaagaaagatggaacatattaaaggaaaagcaggcaaacaaaaaatgagaataccttttagatacaattgctcaaccaaggaaattaaagatattcaatatttatcttaatagtgcttgctttagaggatccagacattgttaattgcacatctctcaatagagaagaccacagagatcaaatctagaatattttgaaaagactagtgacaagtacaaacataaaatttaagaaggaatttaattctagtgaatattgctaatactacatgtgcttgagaaagaacaggacaaatttacaaagcctttcaaacttctagaaattcagcttaagctagaccaggcccagtggctcacgcttgtaatcccagcactttgggaggccgaggcgggtggattacctgaggtcaggagtgagagaccagcctggctaacatagtgaaacctcgtctctatgaaaaatacagaaattagcttggcatggtggcacaagcctgtaatcccagctacatgggaggctgaggcaggggaatcacttgaacccaggaggtataagttgcattgagccgagaccacgccactgcactccagcctaggcaacaaaagcaaaattccatctcaaaaagaaaaaaaaaaaaagtagtgagccaactctttattcagtaggggatcctgtccgctaaggaaaaggtaatggaagggcatattcgattcaggagaatgctagctagcccaataagctgcaaagctcagccccttctttaccagaatcaaagctcacatttccacttcagttgatctgacatgagtatttttctctcaggtgttttgaatcttaggtcagaaagagtggttacccctgcgcatgaccactgtgccaatgtaacacagcatatattactttgggtcttgacaaagggctcatttttagtgactgagtccttctggccaccaggagacacttcagtgccacaaccactcactgacactttagagttgctaagaggactgtcaggccatgggaaactaagaagaagctcaggcttggtacctgaatcatgagtcctacctgttgagcactgaaaaagcactggaaagagaagggaggacccaaaaacttctaaacctgtgcgaatgggctaagaccaatagtgaggttgggattttaggcaagtttgggatggttgtcagacaaagaagccactgatataccactagtacaatgcagttcgaattacaataaaaagttatagggggtttttttgggtcagaaagagaagaagtaaaagagcacacatgattcctatctccttttatcctccaaactaactctcactaacccacagaaatgttttcataggtggcacaaaggtaggctgcaacaattgtggccaatattatggtagagaaggaccctgccctgtaatgctcaacatattaatgttacgtgagagtgggacagggtcatctctgtgacagtatagtcacagaagcctcttcctgctcaaataagtggccttcattaaaagaaacacagaagaatcttgtttcataagctaatgccaatcactgagacagcaacggtttcaggaacatgagggaagctgttggaatgggctttcctttaaacctagcctggttccatcatgctgagtggtgggggctttaagtcagggcctgagaaggacagcctaactgtggtataagtcagagggctcctcattcctcataagccgacaaatacattaatatcatcagaaaaattaccagggcctgtggtgtcccaaattctgatttcattttccattgaagatcagagcacagaggaaggagatacctcactcatgtgctcttcttgttatatgctcacagtttctttgtttcaatgactctgtaccctggaagaggttagacctggatatgctaaaaaaaaatttttttaatccctatcctagaatattgtggccttgaatcaaagtgttttctatgtttgtgttttcatcttccttcctaagccctatatctaggttttgccttctccatccacaaatctcaggatgctatggagtctgaagacacctgattgcagaaagcacaagaccccccaccagcgcgcgcacatacacaaacaaatacaggaccagaaaggagtggttactgctgattctctaacattacaaaaatatcacggttgtaacttctcaccctgccagtcatatgtttctctgtcacttgacatactcccctctttggggtgttggaggaaaaaatctctgtgccaacagcagagacatggaactagtgtgtcacatccactctatgaacagaattcttactactatttataccctaaaaagcaggccattttctagagtttcaccccctcaccagaaagaatttatttgtgagtattggttgacttactataacaagagactcaagtgttaatcattaaaggaacctgttagtgctttcttagaagtaagaggaagatcacatttaactggagagtgccttattgtggttttcaaggaaggtcaaagctcttacttatcactgctcaatcttcacccgatgcccaaagaattaacataattttgaaccttaccctggagaagcgaaatgggaccttgtcctccagaaatgcagaagacactgtgctgtgggctgggggagtcacggagcacgagagtatccatctccagccctcactggaaataaaatctgcacagttctatctctttccagggcagccaccttgttctctgcatgaggagcatggaggtccagatgcttccaggagggatctggggcaaagctctaactaagcaacacattattttgattttgtgtgtctgggatataaggatggccggtaaggggaacaataaagttcttgagatttcacaagtaatttattgatgtccagaatttgaggtgctgatggtacacctaagtggcaatatgcaccaggcagatcaatatgtgactcgtcagagaaagcagaatgggtgatgtgatgtgcaatgccacagaagcactgcagccaggagaggtgacagctaatggggatgtttggagtctttgagtgaaccaaacacatcccagagtaattgtaatttatttcagtcaatcttctgtacagacttagcattcacctttggaggaaggtcctttgagcagggacagagatggtgatgtcactgacagtcccccttttactctgggtgagaggtctagaatcctcagctcctgtattcgtgcccacaagggcctcatctaggtgaaggctccacctgccccaccctgccatggccaccaggctcctctgctgtgtggttctttgtctcctgggagaaggtgagtccccacaaataaagcacctgcatttttggatattgccagttatgattccaattatgtttcttattctgtccccaaattctatctcttttcacagagcttatagatgctagagtcacccagacaccaaggcacaaggtgacagagatgggacaagaagtaacaatgagatgtcagccaattttaggccacaatactgttttctggtacagacagaccatgatgcaaggactggagttgctggcttacttccgcaaccgggctcctctagatgattcggggatgccgaaggatcgattctcagcagagatgcctgatgcaactttagccactctgaagatccagccctcagaacccagggactcagctgtgtatttttgtgctagtggtttggtcacagcgctgcagaatcacctgctccctgtgcagaaaccctggtgcttcctcttctcctccagtacccagcagctctcagcagcctttcttgctcctcccctagcacaggaagtacataggtttcgtgttccacatgtcctaggcaaggcaagaacaggtcataaggacacatcacgttaggaaacttttggtaggaagtcagtgggtgtgatggttcctgggattccacacatacttctcacaagggtgcctgagtccaagtttgagggcgagtgtcacagactggagctttcaagtgattgagtgagcttaaaactgtgcagccattgcacatggatgcttatctcctttgctgctttccgttatggcttctttgccatttcttttctcttctaccttaaaactttcaacatctttgatgacttccaacatcaatattggcttcccagttttttcacttgctcacttcaaatgatcatttccttcaccttgtgtcagatattcatttccactttctttttctagattccaatgacaaattatttgaattacccccaaatagtttcctcaagcatcccattgtctcatgcgggcttctcttttcatctctggtactacttctgcagcaattcttcaacccatcaggaccactaattgacttctcctgcaaatattgcaccatatatcatctcctcatgtactatattccttatctgacttagactatgtgttccaaggtgattgtgaaattttgcctatgtcttcagctcttttctttttctgtttcttacctggaaaataaaatggggcctactctgtgcccctttcaatgacacagagaacataaaatgtcccttacccttgtcaagcagtattataacgatacagtgtgtcttgaggtctgtaagtccctctatgcatataaaattatatacttttcttctattaaaataatttgttaccttttaatgagttcatcagtttcatctttcaattatagttatacttttgacaattatagaagtactaaaaaaagttatgcacccagaatgtatgattctatcacttttatgtgtgtgcgcacttcacttcatacgtacaaaaaagttaaaagaatgccgaataggcatatttatccattctcttgtaggaatgataaagatgaacttccaaggggaaaatattttcaaaataatccatggcacataaaattatttaagaaaaaataaatcaataaatatccctgttaagtttatatatagttttatatgcttgggtaaggaagaaaaaaagttgtgatatattttgctggttatttggagagataaaatatagaaagagcagaaagaacatgattagctttgtctttgtttaaaatttttgctttttaaatttgatacactatttaccatcaaaatttaaaacaacaccactgctataaaacaatatacagacaaactaaaaagaaaaaggaatttactatgtaaaaaaaaaaaaaaaagcgagagcttataggcagagtattaaggggaatttaaaattataaagacctgtaagttttcagagaggtataggcctcacagctggagctgggattttaatgtccatatgaaagagatgacagaaaacagccagaattacattgcttgccttaatcctggagcttcaaaatgctcccaggctttataaagtaaaagtattacaccccaaagacccagaaacataattggaaactggatgtttggtcaggcctttgggtgatagataaaaaggaaaagttaggagagaaaaattgaatcttcagactgtgtctcacatgtgtttggaatgaaatatactctgcatggaatgtacaccatatacccaaaaactgacaaaaaggtccataaccattaaaacccttggagaccctggcattaagagattcaatacggttctggagtaaacttctgcttccaaccaagatagattaacgggaattagatttaacttcttgcttgaaacagctaacaccccaacccccaccctgtccccctgcacacacacattcacacaacatgtggaataacggttgtcaagacattggaagtaggcaacagaagacagtgatctctgagagatggaaacaaccaagctgagaactatgactgtcttaatacctggagggagtttccaggccctgggccagaaagaggaatccaagcagagctgggtgatctcactgagctgagtcagagttggaaatacaagatcaaagcagctagatttcacatgacaggccattgaaaaggcgattgctgcacagagagaatcctggagaccttcctagggtctcccttaacccttcagctgtgctgtaagcagtacatgtgtgaggaaactccctaaggttggagaaagagccactcagcaagattagaggaaacaatgcctggagctcacaaagggctgagagtaatatatacatatattactctcatatatatatgtatatgtatatttttgcattgagaatgggaaacttaataattcatgggtcaatcagtagaggtttcagatgacttatgcctcagtataaaagcaaaataagcccttcactaaataagccacatttggctcctggcctatgtgggtgagacttcaaaatatcaaactgtttccgagtaacttaagtctcagagcaaaactaaagaatatttctaatgtacaagaatacctgttcggagatatcagtatgaatttattgtttttaaacgtatagatacaatggtaaagaaatgaatacatacctgtgtgaataatgggttggtatatatacatgtatttcatacttctgtccacttagaagaccactagtgcacagatgtttgttgccaaatattattctccaattaaaaaaaaatgaaaggtggttctaggaccctgaggtaaaaaatacaagaatgttgtaatgaggttttccaaaaaaaaaaaaaaaaaaaaaggatgggacatatctcaaaaggacagaggaatcaatctgaaagagcttccccaatgactaaggctggaacaatttgtaaaagaaaattcacaagttcacactgagaatgaaacgattaaataaataaataaataataaaaaatgtgagaaaggacaatctcttactgaagaattccaaattgcatatgtagaagaaacagagggaaatagaaaagtcactgtgacaacaccactgtgagtaactgccacacataaaacccaatagtgagtgctaaaattagtgggtgtagctaattttaattactaattaataactaataactttaataactaattaagaagaaatggatcatttgtacagtcacaaagtgtcatccccaaaatattaattaatatggtggttttaacatatgcccacacattcttttatactcatccctctagattcccctctcctggattcagtggcctgcctctaatgaacagacatgggaaatagaaaaatggtaaccgagtgatccaaagtaaataaactgacccataataagtcttgttaacctcatgtgcattctcttatgatgcaatgttgtgatgttatcatgtgactacatatctgtaatattcctcccccaaatctataattcctgtctaataatgagaaagcatcaaacaaatcccaaactgaaagagattctacaaaacacctgaccagtaatcttcaaatgtcaatatcgttaaaaacaaggaaagagctgtcacaaattgaaggacactaagaagatatgacacttaaatgcagtatgggatcctggattaggtgctagggcaggaaaaggtcattattagaaaaactggggaaatctgagtacagtctagcttagttgtgccaatgtcaaattcttagtttgtgtgatgttagcactagtgggtgttggatgaaggatataaagtcacttggtagtattgttatagctacaggacatcaattctccagctttgggtcacctgagtccctatcaagccaatttgtgaagctgctgttagttgtccttactccccagtcttggagctctcagttagacctagaatcaacctcttcttcctcttgacctctgcttcactgcatcctaaacgtggtgaggtggaggggtggtgagggaggctgagcagaagcccatcattcagaagcccatcactagagcttctctgatgattctctgagacaggggctccctctgtagtctcctttgtgcacaatcccaagcacgctgggccacacagactccaccaaagctagttttgtgaggaggcaaatattgaggctccattgtgaagagaatgtccatgtcagatttaagtacaaaagattaaagttgatgcattactattgcaggaaaatgatacctgtgagaatttccaaaagccagattttgtattgtgtggctggctgagtaatacccctccccacaaagacattcacatcctaatccctgggatctgcctctgttaccttagatggtgagagtagactttacagatgtgatgaagttaaggatctggagataaggagattattttggattagtctggtggccctcaatgcaattacatgtgtccttataagagatagccagggggagatcagacacaaatggagaagagaaggcaatgtgaccacaggagaagagattagagtgaggtgaccacaagccaaggagtgaggcagccactagaaacagaggcaaggaacgaatcctctcctatagcctccagggggaatacggtcctgatgacacctggattttggtccattgatactgattttggacttttccagaactgtgagaataaatctctgtcattgtaaaccagcaactttgtggtaatttttatagcagccactcaaaattaacacactccaatatgtccagttaacctgagactaggccaagaaactcatgttcttataatattttctgcaaaccttgctgtcatgtttttatctgacacccatctcaaactataatgaaagaaaataattttgagacttcaatgtccccctgtctggggtgtgccttccatagttcattggaaaagtctagtctcctttcaagattttattccagcagtacctcctcttgaaagaattttaggcattgttttctgttctcagtgcacatactaaaaagaaaaagacaaagactcatgtctacttgatgtttacatttttgcggggagggagagacagagataaacaaataagtaaggcatatagtgtattagcaggtgatacctgcaatgcagaaaaagaaaaggcagactaaggtgagggagaccaggactgtcagagtaaggagcgttgaaatgacaatacattgttcagagtagggcccaatgaggaagtgacctttgagcaatgatttcaaggagatgaaggaaagagacatgtaggtatctgggggaaaagaattccaggcagagggaggagccagtacaaataccctaaaaaaatattttaggaccaatgaggaggcccatatgactgaaaaattaaggaagggagtggtagactttatttccaagcggtaatggggcaggatggatcatttaagaccttgatggccttaagtgctttgttgttttgttttcttattccaaataaaactgggagctagtagatgatttggagatgagtgacatgatctagcatgttctagagggctgagtttgagagctagttcagaagtaggtgaaagcagggagatcagttaggaatctattgcagtaatccaggaaaaagatgatggtggccttgtcctgagggttagcaaagaaggtgatgaaaaaatggatggattctgagtgtattttcatgatagagccagttgaatttcctaatggattggctatagggtgggatagaaaaagaggatttgggaaccactctaaggttttcagctggaaggctgttggtggagtaaagttgaggataatctttcatgtttagagcatgctgtttgagagtggtggggggaaaatgttgattggagtgcattagagagataatgggaaaagagaatttggaggtaagtattgatcattagcaatagcaacaatagctaccgtagattaaaatgccccacagtctatggggatgtgatacatgagggaagacagggccagatgggatgaggtaggatccagacatcagactcaggagctacgagtggtatatataaggttaacacctagtcaaatgcataaacaggttgattttaattgatgtcagtttttctccattgccccctctagaggcaatcttcttcagagaaccctggctaggtcttctatgtttcatgtccgtagagggagctcctgagactgtggacattggctaatatgctgatgtcactggaggccacatcttacagggccaagagacagatttgctttcctttttctcatacttgtaagctccttcatctggaaatgtgatttacctgggtcctgccatggtttccaggcttctcagtttagtgtccctttgtctcctgggagcaagtgagtcttcaggtacttaaatatctgtgctgtaccctatcccagtctattcatgtcatgtattctgtttttgtctcttcccacagagcacatagaagctggagttactcagttccccagccacagcgtaatagagaagggccagactgtgactctgagatgtgacccaatttctggacatgataatctttattggtatcgacgtgttatgggaaaagaaataaaatttctgttacattttgtgaaagagtctaaacaggatgagtccggtatgcccaacaatcgattcttagctgaaaggactggagggacgtattctactctgaaggtgcagcctgcagaactggaggattctggagtttatttctgtgccagcagccaagacacagtgcttcacagtcgtgcccttgctgtgcaaaaccatagccttctcctctcaactcacagctgcccaaaaggaaggctttccctgtgccttctcccccaaggaggggagataaagaaccagaattaactcatgaaatacaagagtattccaagaagatttgggtgaaaatacttgtggtttgggggatctctgaagttttttaaacagaactcaaactatgtgtttctcatatttatttttattttttaaagtgtatgttgcctggttataaagcagacttcttgcctatcttgctgctctgaaaggtttgtgactctgactgtgaggccacatctttatatcccttcttatagtaagagaaacaagtctttctgatgaaaataaaaatagtgaataaaaatgcatttactactggcttttaggatgctcaatgatgatgctagcaatggtggtagtggtgacgttggtaatggtggtgatgagtttaggttgcttttgtctagcatttataaatttccaaccactttaaaacaatctcattttagagtggaatagctaagtccattatcagaggttaatgctaattttctgttcacatagggtctgagtttttaatgtaaaaaatatagttagcactataaatagatatctgtcagccgatacagaacattttttaagatcacttccagttgctgcaataggaatatgtattcctattttttttcttttttctttttctttttttgagacgaagtcttgctctgtcgcccaggctggagtgcagtggcaaaatctcagctcactgcaacttctgcctcctgggtttaagcgattctcctgcctcagcctaccaagtagctgggattacaggtgcctgccaccatgcctggctatttgttgtatttttagtagagacgggatttcaccatgttggccaggctggtcttgaactcctgacctcaagtgatctgcctgcctcagcctcccaaagtgctgggtttacaggtgtgagctactgtgcccggcctttttttctttttgagacagggtttcattctgtcaccccggctggagtgccatggcagtgtgatcacggctcactacagcctcgacttcctgggctcaagcagtcctcctgcctcaggctccctagtagatgggactataggtgtgcatgaccacacccagctaatttttgcattttttgtagggacaggtctcactatgttgcccaggctggtcctaaacttcttggctcaagtgatcttcctgccttggcctcccaaaatgctgggattataggcataagacaccatgcctggcctggaatatgtaatttttaatgagacctaatggtataatacattctacctggttcaactgccttcttttaatatctggattccaatattctgctcatgtttcagccatgtttttgcaaacagtcctgaaattcactctaataataagtttcattttcccagtctgattgttatttagcacctcaaattattattgaactcatcctaatcctgattaggcaaatggatagtgagaaaatattacaagtgggcttggattttaattttttcaaacaatttaaaacccattttccttttctaatgatcaagatccaatttttagataatcagtactctctctttctatgtggacatgtaatatgaataggtatattgtttctgtcacaggcatcgcaaactcatatcttgcttgaaacttgtcgatgaactcctttagtatgacaagaacaaagagaaatagatttttaaagcatagccacatattggacatgagtttttcttcaaaatttcagctgcagaaccctaactggtgcctttccttttattgtgttatgtaatctaaggtcataataagtaactaaattattgatttatttttccactctgtaatctctccattatatttaaaaatagcagctatgaagcaaaacaagttcctcgttgggtacattgcctcaactccaaaatctaacaagcagaagtttaattcagtgctttgccatttcatactatagacaccgaatgtcctatcctataaggggcacacagtggttctctttatagttctgttagctcaagtggtatctttaggtacaatttttagaatttttttatttgttaatctttcttaaggtatgattgacagaaaaaaattgtaggtatttaaggtatacaaggcgatgttttgatatacatatacattgcaaaatgattaccacactcaagttaattaacatatccatcacctcacaaagttacctttgtatgtatatgtatggtgagaatgatctactctcagaaaatttcgagtgtacaataatcattaactatagtcaccatgctgtccattaggtctccagaactttcgagcacactccaaaacatcaacttttattctgattaagcctcaaatatgtcttcttgttgcaaatattagctatttttagattagctataaataatgaaaaatgctagcataaaagatggaaagaataaatgcagataagggctctaaggtctttacactttccaggaagtgataaaagctgcaatttaaattatacatgaagaagtcaaggatggcaactcctataaacagctgatacttcaaacctggaatgtctagtgctaagcagcccggacccctgcacccagcacacctctctttggcatgataggaggatgagggatccaggtcttctcctcccatgctgcccttggcctttatgttttgcctttcattagtaaggcttctcccttaattatcaccctatgacaggaaattcatcctaagcctggacacgtgagagatggtaactctgaagcagccccctgcggatgacaccaaatgaggccacacccagaacaaattgcaagaaataacaaggtatttcttacagaatccctaagagaacatgtctgtctgcatttaagtgtctacagtcataaatgcacagcatatgattggatcagatggaactgaaagactttcagtgcttcatggtgcccataactctcattgtcctgaagtggtgttggcagtggactcagcagggtgccgtgagatggtgaggctacacacatacgatcgtgaccaagctggctacacagatgggccaaactcaccctgtgatggtagacagagcttaccaatgggttccatgaatggacaatgggcatgctgctgtaataatcccttcgaccatgatggaagtcaggcaagacccaggccatgggaacattgaaaacagtcacctctagcctcaagtatttcctactgtttgccacactgtgcctacaaatatcatttatgatacagcttaaaattttcatgtttgtgaaaattattatcagccttatccaatctgatattttgaatgaaatcacattaaaaccatatattaatttaagaactggcatcttcataatagtgagtcttctacagtttcctagaccactaaaaaatcatggattgctatctcagacttgaaatgggtgatccttattcttctctcagtcagaacagtgaaaggtacagattcatggcagctagtccagcttctaaaagtcaacttctaattgtctactttaggacaaaaaagaaataatatccttaggaaggccaccatggaattcattctatctgaacaatccttacataatatcatttcttataatatgtcctcaacatcgtgctctgcatatatttctccaccatctctaaaaatcctcttagcccaggcctcctcaaactttaatgtgcatgtaaattatgaccttgttaaaatgcagattctaatccaatcagtcagggttggagctaaggttccctgtattttgaacaagagtccgtccaagtgatgccaaagctgccagtccatggaccacaatgagcagccaagctctagatgacacctacaataattacaggtgtaaggcccctcttctcaagtatcattttgcacagttcctggactaggtcagatacagaccctacttaccacatgtatctctgtattccaagtattacgtaatcatcagttttcctaaatctaggcaccaatattttaacatatattttcatggtataaatagaaattaattttctatagtaaatacactaatacctaatcacattcatgcatctttaatgtgagtagcaaaaagccaaggcactatcttaatggttattgagtgagactttagcaaatactatctttatggagaaacctctgggctgctttttaggatgtgagaaaagtgaggtaaagtgaggagaactggatgaacacgggacagagacagggacaggggcaaatatggggacacctgtctcaaggaagcagcaaatgatatagaaaataaatatctgttccatccctgttccagacaagcccatgtacctgccaagtaggaagctgtgtatcacattgcaacaaggaatgaccccggccctggtaaagtcaacagcaacagtcatcacaggccaatctgcctatcagggactggagactctctaaactcccacctctcaacccaggaatcagagcctgagacagacagatgcttcattcctgtatggggtggtattcctgccatgggtcctgggcttctccactggatggccctttgtctccttggaacaggtgagtactgggcagaaaggaaatctttgagcaaagctatcttgtcctcagtctgcacctttcattcacagcagtaacactgttctccttaactctgactccaaatttgtcttctttctctacaggtcatggggatgccatggtcatccagaacccaagataccaggttacccagtttggaaagccagtgaccctgagttgttctcagactttgaaccataacgtcatgtactggtaccagcagaagtcaagtcaggccccaaagctgctgttccactactatgacaaagattttaacaatgaagcagacacccctgataacttccaatccaggaggccgaacacttctttctgctttcttgacatccgctcaccaggcctgggggacacagccatgtacctgtgtgccaccagcagagacacagagctgcagtgcttcctgctctctgttcataaacctcattgtttcccagatccaggtgctttctctaggacttctccctcaccacctcttacaacaataggaagtgggttggtggctgtcaatatctgtagacagaagttgagcacaaaccaataaaaaccattgacagttatgccaagagtggaaaagtggttacacatgcctggcattcagttggtggtattttcccaggatcacatttagaacccatgctgtccttttcagaagacaaataagaactttttctttctttttttcattgttttaatctaagtcagaggcttagaaatataagaggtgatatgtgaagaattatggacacccaatgtctatgaagtccagtctctggcattcgatgaactcttataggatttaatcctcctggagaatccacatgtttttagcctagacctggagcaactacctcattaatgggagaatgaaagcacaagtatcccaagataaaaatttctcagaggtaaaaccacattggagagaaaaaaagagaagaccatacattaatctgctcatatctggagttggaggtactattgagatgagcaaatggaaaccataaatacataaagaaatgatattgaaaatagagtacatttggagatgaagatcatggagccatctgtatagaagagagtaataatgtcattaaggtgcataagagtgccagcaaatgtcaataagaaaaactacaggagggaagaagatgggagatcctgctccccttaacaaagataaataaaatgctgagtgagaaatattgcaacctcataaattgtcacatggaagtatgtatttataaattaccattataattaacatccctcaatgagaacgatattctgagaaaaaaaagcagaaaatatagttatatggctatctaaaaatgtaaaattttgcacattaaattaagataatctaggaaaaatatgacaagacctattacaaaagagcttttacaaattgtttgctttaatgatattaataacataatgatagctaacatttactaagcacatattacatgctagaccttaagtcttcttcacatatatttatagttcatgttagttttataacaacctcagaaagttaatactatagtaacctcactcatttatccatgaggaaactgaggcacagacaagtaactagccctttatcacgtatctcgtttgtggtggagccagtatcaaaatgtagacaatttactgctggagctcattctgtcttcggagtttacatggattctaagtcagaccttcagataggaaggtaaatggttataagccagaagatttccacactctcaccaacattgcactggcttttctttgggtcttggccagagggtgagcccttgtgactatgcttcactggttgactaggtttgagttgcaccgaggaccaacatagagaaagaaggtctttgggataaacctgggaggatgaagggtaaaaaatgcagaacttaaatcttgatcccaagggatcatttaaagatgaatgagtctcccttagaggatgagaaattaaacataaactctttaacttgcagagatgctgaagtgttttcctcaagtagtaaactttgaatcatggttatatgcatgggagggagcctatggggatggaacatggatgaaaaagtgacaggatgttcagggggcaggtgcgggcagaaaatcagctgcctccaagagtggtgagagaagctgtagagcatcctttatccagactggcacaacatgcagtccagaaggctgtgagatacgaggaaagggtcaccataaactgcaacctgactatgtcaaaaatgacacttggaatccgagagtgggtacgtgtggtggtatcacagatatacacccaccccatccccgcccaactgggagataagagacttacaggtttagcactttcaccactgggactagaaccctggatttagctagaggctggcttagaccttttcatggttcttctgtatgaaccacacaatttagaaccatactatttagagatgatcaatttatacgacctgcataaagcctgtctttccagaagaagctcaggttcaaaaaaaaaattgattcctctcttgtccttctcaatcttccctccttccttctttcctttcttcctgcctgcctgccttcctcattaaggatagacatgaactagtcacctgtatactctctgaggtatgctgttagtgctgacaacacattagttcaacctagaaaaactaaccctgttttattttatcttatctgagagtctgagacccctctttgatccttaaaaacttgccaatttcttgccaagcaaatatgtgcagggttttagagagccgtaggtaacagagacaaaatagaaacaacacacagaatttggagcaaagcctttagatctctaaagcttgaggccccactgctgctctaagcctgcctatggcaccaggttcctctgctatgagtccctctgcctcctgagggcagtgagtcctgggcgtagatagtctgtctgccttgggcactcacactgtagtctgtttccacaccttcctctggtagtccaatattcacccccattttcctctctagcccctgctcctacactctagtccacagactctgtggatatcctaatcacagagacagaaacagaggtgacactcagatgtgagtgatgaaacttacaatgctgtaaacaagactcaggacttagactgcctactgatgttcattcttgtgccatttgttcagcaaatatgtatttaggaactcctgtataacagaccttgtttccggttctggaaataaggtaataaacaaaccagagagacttgttttaaactcctggaatttataaaccaaagagatgtatgtgatgagaacagtacgactctggataagaaggaacctgttaccttaacactggccagtgcaaacccagtctggcagacatctgtgatcctctagacttgtaaggaatcctatagctgtatagctctttgcatttaagggcaaaactagacaagacagaacctcactctcatgaatccatgccctaagaaagagaagaaacttccctcataggaacattggtgcagtctcgcagttttcttatcaagtaggaaaattagaactgctaaaactttgtgccagaatttaagacaaataaattgcctggatcatgcattatttacaattatatttacaattatatacagatattttccctaatataaatctgttgatgaaccacttatgtggcatataaataggacttattaaaagttagatgcggtgctttagaagatatattaaaattattagagtctgacttaaatttttaatagtaatacaaaatataaagtaccacagccttgttcagaagaaacaggatttctgaaatccaccagaatagctttctaaaagccagtatcttatggcctttagtgggctgaaatacttataatgatggattggaaaaatggatgtttgagtgcataaggttcacgagtataagaaacaattggtacctcctaactatagattgtcagtttcagaggatgagaatgaatgtgccctcatcctcattttaattttgaaagacaatgcagatatccctactatagaatcattttttacatcaccacctatagagattaacaacatagatgtttccagctccctaagaggccaagaagtattaacccaaggtcagattcaggtaattgatcgtgactcacgaattttcagagatccacaatggttgtttttaaattttcagcagttatgtctttttctctggggagagggtattcaaagctcctcatgaggccattctggactacttttcccctcctgccccctgcccataaaacagtttacagaaataggtgtccagaccgtgggctgtagttcaccaactcctgctctagcctaattttgtctcattactagagcatggccattctgtggatgccagtgaagcctttctggggtttctctccaatgccttttaaagctttttcctacacagacacagtttactgtttagccaaaaaattaagataattcctccagacatctggagttcttgtgcagcttcctcctctctggtggtctttccttaaaaattctagctgcctcagcccccgctgattttgtaacctgtttccgcaactcaaaatttgccatgctctgttgctctcttccccattgtgtatgtgcagaaattgcccccatgttttggtgttttggcagaatcccagtcctgtgctgtctgctttccagtggctgaatacaattgtttcacatattctcttaatttgtgttacttgtatagagcaggatgctaaaggcaattggattctacaaagtgatcacgtcacagagaagccgccgacagaggtggagagagccacacagatagccagctgcctgtgctgcctgctcttcccctaattctgccatgagcccaatattcacctgcatcacaatcctttgtctgctggctgcaggtaagtccctgttctgcagttgtcagctccctgctctaagcctttcatccatgtcatcgaactccctcatgggctcagtctccaactcctgtctgctttctttacaggttctcctggtgaagaagtcgcccagactccaaaacatcttgtcagaggggaaggacagaaagcaaaattatattgtgccccaataaaaggacacagttaggttttttggtaccaacaggtcctgaaaaacgagttcaagttcttgatttccttccagaatgaaaatgtctttgatgaaacaggtatgcccaaggaaagattttcagctaagtgcctcccaaattcaccctgtagccttgagatccaggctacgaagcttgaggattcagcagtgtatttttgtgccagcagccaatccacaatgttaaatattagctaatcttaggacacagactcatcacggactcagctcaggaagcaggtggtatactaggttggaaggaaataacagaaactagagctagcttaagccaaaggggaatgtattataaggctaaatgtatgtcccatagaaccacaaagcaagaacacaggaacttcccagaaataaactgcaatgaaaccttagaaccggtggtcgcgcctgtaatcccagagctttgggaggccgaggcgggaggatcacaaagtcaggagatcaagaccatcctgactaacacggtgaaaccctgtctctactaaaaaaaaaaaaaaaaaaatagccgggcctagtggtgggcgcctgtagtcccagctactcgctactcgggaggctgaggcaggagaatggcgtgaaccgggaggcggagcttgcagtgagccgagatcgtgccactgcactccagcctggacgacagaacgagactccatctcaaaaaaacaaaaaacaaaaaaaaaccttagaaccatggcatggctgattgacaactcattttttatataccttgtcggcctcattattctcttttattataagttgtcttttctgtttcttaggtcttacagtgattagaaaattgcagatttaggtgttagccctccagtcaattgagaccaacgtgactttctctcatgctagattacaaatccagggtgcagggggaaaaaatgtgatcctgctttactcaagaatgggctcgtggaaatccaagggaattgaattattttgaacaagatagtatctgggagtctgtccctctgaccttgtggaccaaggatttcaaggggtggaatccagtcagaacatccaataggcacccatcacaagtgagaagttggggataatacattttctggaatatagagaccttgggaaaagagaagagtttggagaggggatcaaaaccttattatttagaacaatatcagaccacgtaaagagtctggttaatctctctttaagaaattaaaccggccaggtgtggtggctcacggctataatcccagcactttggaaggccaaaagcaagcagatcacctgaggttgggagttcaagatcagcctgaccaacatgaagaaaccccatccctactaaaaatacaaaattagccaggtgtggtggcacatgcctgtaatcccagctacttaggaggctgaggctgaagaattgcttgaacctgggagggggaggttgtggtgagccgagagcgcaccactgcactctagcctgggcaacaagagcgaaactctgtctcaaaacaataaataaataaataaaatagaaggaataaaaagaaattaaacctagataacacaaaaagcatgttcattttaagtgtgacaacttcagatcctacaaattcactaattggcctctatggcactgaaggagaacagattaatgtactcttggtgtaaaacatattaatgcacagagaattaaaagatcttcaggtatatgattcaaattgtaatgaggggcaatgtactcaacatcaatattcctaatgaggcattatggtatcaactgtacctaggcaggagactacacttatgttgagcagttatagaattcaaaataactctgttaaaatttgataatccattctgttcacagatctggtcaccacctagcattcgctttgagagaagttcctttattctctccagttacatctgctcttatttcagtataagttgaacccagttgtcttacttccagaagtccaaagttacttcttttcttgggaaaaaaatttactgtgactcctggaaacagaagttctcactttatcatttttctgatctatttaatattataccttctcattttaagttccttttcccgctctccagaagtgagtgttccttagcgttctgttctcggtccccctcaagcccagtcttgctgttggtggtctacatctttgcttttgtcacagggaagtcactcctctagatgctatcttcagctttttcttgaaatatttccattctaccaaaactgttctcctaaagattaaaattacgtatttcccagaccaaaagacgcatgtgtgtttctttgcctgcttgatctctttgaagctcttgacaatactgaccatgccctaagtcctgagcattaatttttgctcagtttcatttacatcattttcaactagtttctcattttctctctattctttttgttttcaatgcagctcccagaaactaaatctatccatttaatattctttttcccaggaaaattcttctcattctatttaaagtgtaatattctagtttaatgggaaagttttttgttgttgttgtttagccttttaaaaatctctactgaaaaaattttggatatgaaaattagccaggcatggtggcgggagcctgtaatcccagctactcaggaggctgaggcaggagaatcgcttgaaacttggaggcggaggttgcagtgagctgagactgcaccactgtgctccagcctgggcaatggagagagactccatctcaaaaaaaaaaaaaaaaagaaaagaaaagaaaaaattgtgaaatgtggtctgagacaacttttctcagtgtcacctgaggcatgggttaaacaggtatattctaggacaggttcagaatttcagagtcgaaatttcttgttggtggactttaggaatacgtatcattgctcctgagtatttctgttagtgctgaagttctgccccaaggacttcataagattaataacatcgcaaatcttctgtagtgctttaaaattttgttcttcatttttttattctcactttcttctctttccttttccacttcctcttatgttttccttaatcttcaactttcctaagcacctgcaagtgggattggagccttgtttaacatcgtccatgtagcaaaataaggatgaggccaaatatttgaaccaaggatccccatctcctatggaaggtgccctgaggttgtgggtgttgctggggacatgatgtcatggccagatcctacatcatgcggccaagggaacccagaactttcactgctctttgctactgcacatcagaacccatcgctgggagtgtcttgcactgcctgacctcaccatggatatctggctcctctgctgggtgaccctgtgtctcttggcggcaggtgggtccaggtatacttaaacatttgcataaagatgtttttggctgggcgtggtggctcacagccgtaatcccacctttttgggaggttgaggtgagtagatcaccagaggtcaagagttcgagaccagcctggtcaacgtggtgaaaccccttctctaccaaaaaatacaaaaattagccaggcgtggtagtgtgctcctgtagtcccagctacttgggaggctgaggtgggaggatcacttgaatctgggaggtagaggctgcagtgagcagagatcacgacatttcactccagcctgggcaacacagagagaccctatctcaaaaaaaaaaaagatgttttctttgggcttcccttcaccttctatggcttccgtcttcttccacaggacactcggagcctggagtcagccagacccccagacacaaggtcaccaacatgggacaggaggtgattctgaggtgcgatccatcttctggtcacatgtttgttcactggtaccgacagaatctgaggcaagaaatgaagttgctgatttccttccagtaccaaaacattgcagttgattcagggatgcccaaggaacgattcacagctgaaagacctaacggaacgtcttccacgctgaagatccatcccgcagagccgagggactcagccgtgtatctctacagtagcggtggcacagcatggctgagtcagttccctccagggtgcaaaccctctggctgctcttctcccagttgaactccaagaaaacatttgaaaaagcctcttccttatcttcctaccccagaagaaagaagcgagttgattgttgtggctgcagctgctaccgggagagtacaagaccatgaattaaggtcttaaatggtcatgatgggcacactggacaatgggctcctgaaactacccaaatacaaaatgagacattctgtggatcaggaggaatccacatgtttagaaggaagggccccagaccaatttccaagttcagagaccagctatctgaggttgatattacttaccaaaacacaaaaacattcctactgattttatctcaaacacagttctcctgcaaactcttcccccaccaacgtaccccagcagaggcaatgacatgtacatttatggaacagcctgttgactactgcagatccatctcttcaataagaccaactttccctggaggtcagtgactaaaccaaaccgcaaggcagacggcaacacgaccctcttaggggatggatgccagagaaacactgactaaaatccccactcggggactgtcctagcacattcagttcctcacacagctgcacaggggagcgcgacgttttattctgttacttcaaacactcatctgttcctctctctctcttgcaggccctagactcacagacactggaattagagtcagaaaaattgctttctaatcccaaaactggttttgtttactccccttcagctgtgaaatcttggcaaatgctcttacttctctgggactcagtgtcctcctcttcaaaattagagacttgctccacttagtctctaagatctgatacaaatatgattatttgacttgctatttatttatttatacaaatattagaatatttatgtatacatttaacataaatatatttatatttaataaaaacataaaatttataacattttatataaatttatatcaataatatatatttattgatatacttatatcacataagagatatataaatatatgcaaatatattttatgtaaattttaatacaaatataaaaaatacattttctatataagtatatataaatacttatatataaatgtattttatacatttatatataaatatatatataaatatatatttatatataaatacaaatacttatatatatttatatataagtattaatatataaatatatgtgtttatatattattatatataaataatatataaatatatgtgtttatatattattatatataaataatatataaatatatgtatttataatatttatctatttatctatctacagctattttacacatgtgacaatcagggttgcgatggaagacatcactacaagctggaaaatatgaacataattacatatgcagataacacagatccagagactatctgattgcaaggaacattatagatcacccctatataccataactttgaagctaatttgaaatgtggtttgtgaaagtattatacatttcctgcaatcccctccactgctgctagatggcagtaaaggaacgtgttagaaagtctggggaggggacctcatgatttatttaccgcgcagtcatgatttaccacgcaatcacggtttagtcttgttgtcctgtcataattaatagtatcctctttcacatacaaaagtgtctcaatttgaacattaaactatacggtcattgtagataatgacacaaatgatagcatctctgttgaaagtaaattgtttattaatgttgcagtaccttcatttctttgtttcggtttaatgaaatagattttttaaattatagaataaataaactcgaagctatagcattggtctgctttttgtcattttactatttaaatatatctcagccctacttacagtttgtattagcgatatgtggtgtatgaagcctcaacttaaaaactcagcttggtcttcgtagtgcttctgtcactgtctgcccagcacccactgcctctcaatgtgttccaacgtttcccaattcctacctgctaataaacctaccaggatatttccagacctattttctctgtgaagaaaaccaagcgacattgactttccctcattcatctactaatacataaatgtcaccacatgccagtgacaacggggtaaaataagtaataaaagtgaaataggataaaagaattgttatacatttattggctccggagaaatccaccctcttctctctagtctcctgcgcaccctgccaacaatgtcattggctgtaaaaatacctcatgttcatttaacactctacagtttactgagtaatttgttgtttcattttcatgctttaattatatgtttccaggttctctgagcttttgagctcctgctcttcccagatgggctttcataacaaggccagcccctttctctctccccttccgccagtgcccatcatttgaaccaaattttcttcctgtctctcttacttgattctttcccaacctgtgccttctgtttggtctcttaaaatatttccctattcagtgataactcccttaatgaaggcatctttattgactgccttggaaatcctcagaattatagaaacatctttcatgtccaccttggcatgttttatatgtttcacatatattttcataaataataaaaaagttatatattttccatacgtaataaaaatgtcccttcaacatgcgtaatatataacaagattagtgatcttccacctaatgtcttggacaatgtgacttctgtctgataggtatagtctttgacccctacttactcatgattaaagaaatacctttctctcaaaggaactatctgtgttcacagcgttaagtctcatcctggatgctgcaagaagacgttcaaatgtccactgcccacccaggtatgtgatgctgcctgccatgggtcactagaaggtgatagttaaaagtgtaggctctggaatcaaacaatgcagaccacaattctggctcctctgctcaaatgctatgtgaacgtgagcaagactgtgaacctctctatgcctcacttcctcacctctaaaatgaagataatagtacctacctgaggctgagcacagtggctcatgcctgtaaatcccagcattttgggaggccgaggtgggtggatcattccaggttgggagttcgagaccagcctgaccaacatggagaaaccctgtctcgactaaaaatacaaaattagctgggcgtggtggcacatacctgtaatcccagctactcaggaggctaagacaggagaatctcttgaactcgggaagcggaggttgtggtgagccaagattgcaccattacactccatcctggatgacaagagtgaaactctgtctcaataataataataataataataataataataataatacctacctgatagtattgggttaaataagataattcatgaaaatccctagtgtggtgcctaaaactcaaacgctaatatacataggtttggcctaatattatgaggtgttattatttaggattgctgtgcttcagctttttgttgagtttcacggtttggctcttactggaccactgacagaagcaactccatgactggttattctgtcattacccccagatactgtgcgataccttccaaatctactacaaacaacgagtgtgcatttctcttgcttgttccatccaagaggaaagagatctgtccagagatgtcattctgcttcagtcaacccagccgtgccagacaatatcagcataaatgtcaaaattaccatatgtggtcaacatatgctgatactgtgaccatatgctacatgggacttgttcccttaattgtgaataagagaactattcgtgtaggtgttattatccccaattttataggctcagaaagagtaataattggtccaatgtctcacaactgtatgtttcatggcaaagattggaaatgaagcaataacttttttctagtaaaattacaagaatgaccttaatttctttctaagcaaacgtagcgtatcatcacaacagttatgttaaatcagctcaataatctcctagaagaacatattataatattcattagaggtggtatgggctttaagagggagaaaaaactaggcaggatattgctatatgtgaagtaccatgctagatatttcacatatggtatttcatttcatccataccagcaacccaaaattatgttatttatccctgttttactaacaaagaaattgaagtttaaggagggtaagtgcaggatgaacactaagccaattgtagagctggcttttgtaatcagggattttatttaattcgatttgctctactatcatcatgttgaattaagaatggcaaagggctgggtgcactggctgacacctatagttctagctactcgggaaactgaggcaggagggttgcttgatcccaggagttcgaggctgcagtgagatatggtcatgccaccgaactccagcctgggtaacagaatgagaccctgtctctaaaaatttaaaaaaaaaataagaaattttcaaaaaagaataaaaattaaaatatatatatattttaaggctgggtgcggtggctcacgcctgtaatcccagcactttgggaggctgaggcgggcggatcacgaggcgggaaatcaagaccatcctggctaacatggtgaaaccccatctctactgaaaaatacaaaaaattagtcgggcgtagcggcgggcgccggtagtcccagctactcgggaggctgaggcaggagaatggcattaacccaggaggcggagcttgcagtgagctgaggatcatgctactgcactccagcctgggcgacagagtgagactccctctcaaaaacaacaacaacaacaacaacaacaaaaatttaaaaaaatgtgtgtgtgtgtgtgtgtgtgtgtgtatacatatatatactttttttttttttttaaagaatgagaaaggaactagaacaagcagagagaaaaagcccaggggcacgacagctaaaggatgactaatggaagttgaaaataggaagctgaaaggtacagaaatactgcgggaagacaaactacaaattatgtggagaaagacaagaataagaacagttcccagaggtctgaacacagcacattatgtcttcttgctatacagtggccaccaaacttgtcaatactgtaggcaaatgctagtgtcattgcttgtggctaagcagaaattttgacacttgggaaggttggcatgagattgaacagttgccatggtgacctgccatagatattttgattgatgatgagtagacacaaagtgccaatgcttaagacctagcttcagatacttaggatttagtggagaggctgttttgactatttcttttcttttcttttcttttgagacagagtgtcgctctgtctcccaggctggatggagtgcagtggcacgatctcggctcactgcaagctctgcctcccgggtttacgccattctcctgcctcagcctcccgagtagctgggactacaggcgcccactaccatgcccggctaattttatgtacttttagtagagaccgggtttcaccgtggtaaccaggatggtctccatctcctgacctcgtgatccgcccacctcggcctcccaaagtgctgggattacaggcgtgagccaccacgcccggcctgactatttctgacatctgacttaggctgcacaggaggtggggtttcttgacagggaggagctaatgtagggactgtgatgtgccaggctatttgggttggggtggagaaaccacagagagacagacataagctctctcccttatttataggacatacctactggtcctgccctaggccccagattctttgttagtggccttttctactgggagcaggtggggcattccagtttcaggtgttctgggacctggcttgaagtttttcactgatggctgcatcattaggctcgctcttttgccctttcctcagttcctgtctttttttcactttcagtcacctagaaacgacaatatccaatcagaagttgagaatgagacaagtttgggaagacattgaggaatgtctcatattgtggtattgataaatctagagatggggccacagcttgcttatagctgcttagagtaaaatgattaatcagaaaaagtaatttccaaggatttgtagtcagtctgcctgaggctaatacatttattcacagcaaaatatctgctgcctaaaatgactctgcaagttacccctacaataccagctactcagagtgatgcaatcacctggttgcaataggaaattatcctggcttcagttatctagtagaacaggtgtacatatcaatcttagagctcttgagaagacccagtagccccagacccgtgcaattatattataagcactcaagtaacttctcagctaaaggaagaatgatgaagcaggaaagagagaaaaatgatttgtattttttgtggttaacttgcttagaaattttagggaggataaactcaatcttgactaataggaaatttaattaatttagagagttattaaataatagctcctccacatcagggactatgataaatgttattaacaacacaaagaagaataagactttcccttctaggaacataccatttagtgggaagaaagacagacagatacacacacacatacacacacacatgcacatacacttaaacagaagtggtagaggctgagggaaatcccataagatagacataaagaaagtgctccatttgctcagagttagaggtgaaaaccaagaatattggcagaaaagaatgttttaaagcaactttgaatgattcttccaatgatattggaattagaaaatgaaggtttaggcagagtggggagcaggacagtcactgaagtgggaaggcacacatgggctcagcaaaaccggagcacagtgtaatatcattaggggtgaagtcaagaaaagtagcttaaaattaagccatagagaatccaaagattttaaattttcttttgatttcaaaaatgatcttttcatattattgagccagaaaataattaagtcatctatatattagacaaagttgtcaaaagcaactaaatggagggatgttaaaatgggaaagaaaaaagctagcacatttaacctatagctaacaatactgtattatacacttaaaaatgtgttagcagggtaagtctcatagcacaaacaataaaataaatttcttaaagaaaaagttaactattggaatagcctagacaagaaattatgaggctttgaactgaaacaacaggaacagaatttgaaagaggagaataaacccttgggatacagaatgaacaaaattttaacactgtctgctgtaaaaagtgagggagatcagagggattaaggtgacccttggatttcaagaataaaaatatggccaacaaatccagggaacacagatgaaagagaatattcaataaagaagacatacaaattcaaatggggtcattctgaaattgtggcacatttgagatatcctcatatctatccttataatcaaaacaaactcactatctgctcattctatgaccagtgacctcactcactgctgccttatacttcagggcttacacgtagacacacacacacacaggcacacacacacacacacacacacacacacactaagaaaagtagcttaaaattagaccatagagaatctaaaattttaaaatttagaacagatcttcatctgagccaggaaccattcatctatggcttctgtcatttaatagaataaacaaaatctgcatatgaatccatgcagaactccaagttcagcatggtttctcactgttctcagagctggtacctgaagctgcaggtgtgcattctctgccacactctgtaatggatgagtggaaattcttccataaagcttttgtctattgggagcaggtaagtctaggcaaagtatgcacaatttttttttctgggatacccagtggaaaaaaatagaaaagcatcatttttaaagtactgaaagaaaaaaagtcaacctgaaacaacctcattctagccagggaaaattagtcatttcaagaaaataagagacaatcagactagaaaggaagatataaaacaatctctaactacagttgacacttgacataatcttgtatatagaaaatatgaattctcatacacatacacatgtacacagacaactccactagatttaataggcaagctcagcaaggtgcagaataaaagattgataccaaaagttctattgtatgtctgtatgttagcaatgatatgaaaatgaaattaagagcagaattatgtgtataattccaacaaaataataaaatatcttggcataaattaaacaacaacaaaaaaaaaaaacagaaaagacttgtgggctgaaaggtgcaaaatattgttgaaattaaagacctaatagaaagatactccatgttcatgggttggagggcttaacattgttaagtggcaacactccccaaattgatttatagattcatctctgtcaaaatttcaaaattctagttgtattttttttttggaaactgataaaccaaagtaaaaattcatatggaagtcccaagtaccaagatcagccaaaacaatgttgtaaaagtagaaaaaatgttgggcaactcacacttcacaatttcaaagcttattactaaactacattattcaaaacagtatggttctggaacaggataaacatataaatcaatggaatagaattgagaaccctcaaataaattcataaatttatgggcaattaattttagacaagagtgccagccaagaccattcaatggggaaagaatggtaaatggtaccaggaaaactgtgtatgtatgtgtaaaagagtgaagttgtatcttgtctcataccataaacaaaaaataactcaaaatgaattaaagacctaaatgtagaagctaaaactcttggaagaaggcataggtatacatctttgtgaccttggtgtgtatgtaaccagcagcaaatccatatgggtctgcagtaaactcaattctagctcctaggaggagagaatttggccaaggggcagaaagaagtttaaggcagaggaaaagacccgggcaagttttagagtagtagtaaaaggaagcaaagtatacttggaagagggccaagcgggtgacctgagagacctaagggccctgtttagcccttgacttagggttttacacatcaccatggttctagggtttgtgtttctcctcccttgatgttttcaccttggggcaagctgtctgtgtgctcagtggcctgccagcacttgggaggggctgctcatgtagtgttcttactggagttgcgcacatgctcacttgaggcatttttcccttaccagtggggtgttcctagagtcatatgttagttaaactccgtcatttagcctctgtgcacatgcttgagcccactcgcccaactccagagatcttatcgggaagctgctgattacaagctccagatgtttttttatctatgtggaaactgtctttcccggatgctggttgtgactaattatcatctttgagagacagtttaacaaccacctgaccatcacctgatgatcacctgacattctggagtgtgtgtggtgggggtcggggggaggggggagagggggtctcttctcgtgccctcttcatatctgcctacctattctaacaggtatacatgaagcagattcgctgtgcactgttactaattccaggggattgtgttaattttccagggagaaatgcatgaaggatagtggaggtcatcaccatgccaaccaccacttcacagcccactgcatcttgaactgcaatttccatcacttgcctgattcatataacaagttgagcaaagcaaatttattactcacagacaggcagcaaaggacagtagaagcttaggattcatggtgagtttgtctctcaaggctcagaaaaactacacaggatggatagaatcttgcctgcatatgcctcatgttgcattgcagctgagtggctctgaaagtgcactctgtcctgggttttaaacccaggggctacatttaatgggttaaagcactgtgggacatcctgttccaggagagacaagaacagaggccaggattttcctgccagttcctcattatcacaggatgtggtattgctagcacatcctacagttattcttaagaactataaaagagaaaagggagatccacattgccaaggccatccagggacttatccttcagagtaggcagtgacttcttaaatatgaaactcaaaacacaggcaaccaaagaaaaagataaatttgacttaataacattttttaaagtctgtgcttcaaaggacactttcaagaaagacaaccccaaaatggatatatacttgcaaatcatatatctcacagggaattgtatcaaggatatataaagaactcttacaactcaataatataaagacaaataacctaatttaaaaatgagaaaggatctaaacatgtctccagagaagatctgcaaatggccaaaaaatacatgaaagatgctcagcatcattagtcgttagtgaaatgcaaatcaaaatcacaatgagataccacttcacacccagtaggctgtaataaagatacccagacaatagcaggtgtaggcatagatgtgaggaaattgggaccctcaagaattgctggtgccattgtgtaaaacagtccagcagttactcaaaagttaaacatagaatgaccatgtaacccagccatccctctcctaggtatacccctcagacaataaaaaatatgttcacgtaaaaaatttatacacacacttcaaacagtattattcatattactcaaaaagtggaaatatccatcaattgatgagtggattaactaaataggttttatttctaaaataaaactggtgataaaaaggaacaaagcactgatacatgctataccatggatgaacattgaaaagctatataaagtgaagaaggcaggcacaaaggggcacatattgttggacttcatttatataaaatgtctagaatagaccgggtgcagtgactcacgcctgtaatcccagcactttgggtggctgaggcaggcggatcatgaggtcaagagatcgagaccatcctggccaacatggtgaaaccccgtctatactaaaaatacaaaaattagcttgtagtggtgcgcgctcgtagtcccagctactcaggaggctgaggcagaagaatcacttgaacccgggaggcagaggttgcagtgagccgagatcgcaccactgcactccagcctggcaatagagcaagactcagtctccaacaacaaaaacagagtctaaaataggcaaattcttaaagacggaaaatagattaatgattgccatgggctgtgggaaggaataaaagtgaaatgacatctaatgataaagaatttctttctggggtgatagaaatattctggaattcatggtgacagttacagctttgtgaatatactaaaaaccacttaattatatatttgaaagggtggatgttatggtatgcaaattatatttcaattttaaagaaaatgtcaacactcaacatgaaaatattcaaaattacagctccaacatcagaataaagactatatttttggatctctaggattctgatatgagtaagaccatgagtcattattatttggacactaaatgttaacatgatcttatttattattcaagtcatacacctaactcctctggggtgcctatccaatggagtgagattgtgccttgtttcctgtatctttctttcactactcctgggacaaagtagactttcacataatttttattcaatgctgcaggatgagaaaggacagaaaaatgggaggaagaggctgggcgtggtggctcacgcctataatcccagcacttcaggaggccgaggtgggcagatcatgaggtcaggagatcgagatcatcctggctaacacgatgaaacccagtctctactaaaaacacaaaaaattagccaggcgtggtggtgggcgcctgtagtcccagctactcgggaggctgaggtaggagaatggcgtgaacccaggaggtggagcttgcagtgagccgagatcacgccactgcactccagcctgggtgacagagtgagactctgtctcaaataaataaataaaaaataaaaagggaggaaggaagatctctcaaacacaggcatcccatgcatgactacagagaatgatacagataggtatgcagaataacgggacctgaggtcagagggggaagtctttttagagtttgttctttgaatcacttatattgaaaattcaagtggaataagtgaaggtgacaaaagtgaattacaaatcttaaagttccctgaaaatgcttgaagccatcccttagctgaggtgtgggagtgaaaaagcaaactgagacaatgtgaaatcattttctatctcgaattttccctccagcaatgttggtgtccacttccctgtctcttaatgggtgcatctatatatcacctcttgtcaatacctctactcagcaacagccagaaaatagaaagattatataagccaataaaaggaaaataaaggaacaaaaaataagaatagtggagagatcatctacttgggaggctgaggtggggaggattgcttgagcccaggaatttgggaccagcctgggcaaacagcaagaccccatttatgaaaaaaatgaataacattatctgggtatggtggcttgtagtcctagctacttaggaggctgagatgaaggactcacttgactgatcctaggagattgaggctgtaatgagatatgattgcactgctgcactccagcctgggcagcggagctagatccagtcttgaaaaaaaaagaaaaaaaaggtgaagagggaaaaaaaagaacgagtaatagaggtgcttacttcacaacactaacctcacaaacacacactaagctaggttgtgtgtataggtcagaacaaaagatctaccatttaactgacatataagattggttctcgaaaccataggacccactggaaatggtgacctcacaggaagatgcatcttgtaggaggcagctgtgaggtctggttccccgacgtgctgcagcaagtgcctttgccctgcctgtgggctccctccatggccaactctgctatggacaccagagtactctgctgtgcggtcatctgtcttctgggggcaggtgagttttcagctaaaggatcaccatcactgggctttgttttgggctctacagcagattctcaaatataccctggacctctgtgttgaccaaatattttgtgaaaggtattgacatttatatgaaaacaaataattgcattatggagtaaaaagcaaaattcatgtgagtttttaaatgaacgcaggagacttcaaacaggctccttcactgtaagacattcatccttctgccattacaactctgtctcatgcagtctcttctcctctgaggtctctcaaatgccggcgtcatgcagaacccaagacacctggtcaggaggaggggacaggaggcaagactgagatgcagcccaatgaaaggacacagtcatgtttactggtatcggcagctcccagaggaaggtctgaaattcatggtttatctccagaaagaaaatatcatagatgagtcaggaatgccaaaggaacgattttctgctgaatttcccaaagagggccccagcatcctgaggatccagcaggtagtgcgaggagattcggcagcttatttctgtgccagctcaccacccacattgatgcagagccacatcctctcagtccacaaacatcctccagacctgccttggaaacagcggtgggccaggaagggaaacgcgttacctgtacagtgaacaggtcagctctacggtattctgcaagttgagggtggaaataggggaggattgtaggaatagcatgaaacatcccaggctacgctcagaaactaagactctgtcatccaaagaacataaagatttttaagaactagacataatttttcagtttcaacattgacttaatttgtcagtttcaaaacacttagcagtgtaactctgttttttactccacactgtatgtcaagttctatatttcatgctttacatcaataattttatttaatcaccaagacacacaagcaaaggaagtgctttcttccttttcaccaagagaaattatggtcctaggagttaatttttagaaagaaagagacagagagatgggggaagaaaggggaggggaggggacaggaggagaagggaagggaggggaagggaggggaggggaggggaggggagggaagggagaaggaaacctagtaggtggcaaaaagcatttggctcaaagggttatgatttttatctcacatcatgctgcttagcattcttttaggcataatccttgttctgttccttgctgagtacccgtgcaggtttttacggatgctaggttcaagaattcctgctataaaattatagaacatctgagagatgatggaaatagagttggataaatttgtctagaatttagggaaaaggtctggcccacagatattgttcattagaaatgtgtcacctcaactttttgtcttaatgtttgtttttattctcatcactcaacagatataggccacctacagaaaaagatttgttataatttgctttgatgaaacaatttcataaaatcaaaaggcagacaaaagcaaagtcatttcaaatatatgtgcagactaagtccagcctcaccagcttggagtataaaccatgtgattccactgcagtttttgccctttgattttctaaaatcatttaatgtactcctgcccctccctcactttacccaaaaggagaaaaacccagaaaatcttccaggaagacagaagagggacaccggcttgggagcctgagaaagatccagagagatttccagaaaaagaccaaccctgagaccccagcaaggctgcagagaagatggattccaaacttcatgccatttaaagcaccagacatgtaatttaaagaaacagtcttccaaaggtagtgctttacagggaggggaaaaaaaggcaaagaggaagaaagagggtcttctggcaattcaatagtgaggagaaaaagaggaaaaaggggaaaactgagaattctgcaaaacaaaaggaaatcacaaatcaagaggacccacaaccagccccactacgaaaacaaacaaagctcactaaggagtctggattttgctagaatgatggccaaaggaacattagactaggaattttgtaaaacacctcaataacacgaaaatgagcaagatgaaagtaatacccgtacaacaaaggaaaacatctcacctctgttccctgttccctcatctcaaaagcaatcatgagtcagaagataatgtaagtctacactccaaacagaaataaatacactcaaggaagcagctgaggatataagtgaccataaccagaccaggactttaaaaactcagactacaaatggccaaaatgggaagacatcagaaaaaaacacaaattgattgaacccaggagggacatgaaagaaaaagacaaagttatcccagtcatgcaaaataaaagatgaccaagggagaataaacccaaatgaaaatttagtcaggacattgaacaaaggcaaagaaacaagtagcagaatgagaaggacatgagtgaaaccagccagttagaaggcggtcaaagaaggcgaggtcttggtatgattgcatgaggggcctggaacagcagcactgggctctgtgcagcaggacggctaagcagcaggttgtcacagtggccacagcactactggccagaccccaggagtcacagtttccctgagagagctgagggcataaacaatgataagttctccaggggatggacttcttaaatactctgagttcatcattacacattctatgcatgtagcaaaataccacaggcacccacaaataggtacacatattatgtatcaatgtttttttaaaaaaaggaaaaataaatgaattccacattcttgtataatcagagtatctacagcgctcctggagtaacccaaaccttatggttgctggaaagataaaaaaccaatgggccaattggggtgaaactctggcccggaaacgtggggtgccagccccctcagcacagatgcaatgcagagttatgggaggtgcgaatgactctgctctctgtcctgtctcctcatctgcaaaattaggaagcctgtcttgattatctccaggaacctcccacctcttcattccagcctctgacaaactctgcacattaggccaggagaagcccccgagccaagtctcttttctcattctcttccaacaagtgcttggagctccaagaaggccccctttgcactatgagcaaccaggtgctctgctgtgtggtcctttgtttcctgggagcaagtgagtcctgggttcagggagaaaattcctatctggagtgctgcaagttccaaatctaaggcctccccgagggacagcagcatcaggcgcctccctgggctgtactcaggcatgcctctctttcttttccagacaccgtggatggtggaatcactcagtccccaaagtacctgttcagaaaggaaggacagaatgtgaccctgagttgtgaacagaatttgaaccacgatgccatgtactggtaccgacaggacccagggcaagggctgagattgatctactactcacagatagtaaatgactttcagaaaggagatatagctgaagggtacagcgtctctcgggagaagaaggaatcctttcctctcactgtgacatcggcccaaaagaacccgacagctttctatctctgtgccagtagtatagacacagtgaagcacggatgtcgcctctctgtgcataaatgtgcccagtcctgcttccccgaccaggtgacagggctcctctgcactctatgatggcaggaaacgccactcagccactaagcaggtttaaaaaactgtatataactaaaactctatatataaactatgcatataaaactaaactatatatgtatacatttatatataactaaaactttatatgagactaaaatgatagttttatatagttttttaaagtatagttttatatatatataactatatatatatatcattttttaaactatagttttgtagttttatttatttatttactttttggagatggagtctcactctgttgcccaggctgcagtgcagtggcatgatctcagctcactgcaatctctgcctcctgggttcaagcaattttcctgcctcagcctcccaagtagctgggattacaggtgcataccaccacacctggctaatttttgtattttagtagaggcagggtttcaccatgttggccaggatggtctcgaactcctgacctcaggtgatccacccacctcggcctcccaaagtgctgggattacaggcatgagtcaccgtgcctggctgttttatagtttcatatagttatttttaaaaactatataaaagtttttgtatagccacttagtggctgagtgaagtttcctgtcatatatgatatagatatagatatgtttatatatgatatagatacagatatgttatatatatgttatatgttgtatataagatatatacatatagagagagtcagagagacacagagaagaaggaaaagttaatcttacaacccccagcttttttctattttaccgaatgctagatgaatagatggatgaatgaatagaaatgaatgaatgaatagaaaattttcccttctttcaggaagataaaaaagcctgtggaaagagagatgtagaagacaaaccctgtaatcacaatttcatatgacgcgtgctttaatgagagacgttagtggagtataggaagtaacacagccaattctgtctggtgacatcaggaagggcgtcaaacagaaagcaaattttgagatgaaagttattattcaaatttcaccagatgggcaagtaggatttcaccagatgggcaagcaccaaaagagggaggcaggctaagggaactatgaaaggaaagagtgatgagataataccaggaaaaaaattatcaacactccctcctccaccggaatatggcaatggaggaaaatttggacaaatgaatggagtcaagttattgaacaaaactgagtttcttgttctagtggtccttcattggatatctgtgtagaaacatccaagaggctccgtaagtgcaggtctggcacttagaagagagggttgggcttgagagaaatgtttgagtgatagttaagcacacaggtgtgagtaaaacttcccaggtgatcttgtcttctatgctttctctctttatgctctgccacctatgccttgaattagaaggtaagtggtgtaagtggtgttatttcttatgttgacttacacatgtctatttgatcatataattacatttctggaaattgatgtttctatgttattcttcaaatacaactaaaactgctggttgaaaatttttgtaaaatattgtcagaagcatcaaataaccttagtctgtcctgctgtattgtcctttttttccagggataagaaatttttagaaaaatatgagtccctgtccagaatacacaagccttggctccacgaattttcttcgaattatttcctggattctgtgtttagctttggatttcttcttctacatagcctatgggagtttgactcacacagagtcccacagaaaccaaaatactaaaacatagagatggaaaagacagttctccctgaaaaggatctaaagaacattaaaacatggtatcatgagaactacaaccagtcattgaaactaatgttttctgacggtagtaagtaaaacactggaaatgagatggctctaagctacttcactttgaacgttcagaccatattcacagatgcctacacatcagtcattctctgagccagaggatggagccaaggaccttcatggcggtgggaaagacacagtcccatagtgctatctgtgccctgtatacaagccattttccagaggtgatgggattgggaaagactgtctgtccaatgagaggaagaaaacgaaagggaagacagtaagagatagacaatcttgtttttccttgtttttcttgtccgtgactagaatggacacaaattcctttgtttcagttgaggaatttattaaagcagggcataagagcttaaatagacttcaaaaattctactgtaaaactattaaccatttgcttttttcagggtaatcttaatactgaaaagaacactgtagctatgaagtttcatcataatctccattcccacaaccaggttgtaagagagatatcatctgaagtgaaggacaggaaatttttaaaatgtaaaatatcactgaatgttttcttagcaagttttgagaggccatcgcatctattaaataggaagataatttatataaaattttaatctagaactgtatttctttaacataataaacataattgctctatttaaaatcacattgaacataacaaattgtaaattagacaagtcagaaaaccaatttgtcaactgtttaaaaattgaagaaatagtccagaattcttaggaagcagaaagggatatttaacgtgtgagaaaaaggtactaccacaatagcagctttattcccaatggctccaaattggaaaatattcaacatctgacaatgcaatggagaaatgattgtgttacatttatgtaacagaatacaatatagcacaaaaaatcaagtgtaatttccaacacagatatttcaaatataacattgaataaaatatagtagacacaaaataatacagtatgtagtcagaatagtgattaaatttggtagcattatgtatttattctgagggagacatgaggaaggcttttggaattctaaattctatatcttgatctgggtgatgattacatgagtatattcatttcaaaaattcattgggctgaacacttaagatttgtgcagtctatgtattttatacctcacttagaaaacttaaaatggcaagtatattatcttgaccaataatctattgctgtgtgacaaaccactccaaaagttagtgatttaaaagaacaacatattattatctcttgtgattctgtagaagggctcagctggacagttctcacttagggctgctcacatggtcactgtcagatagtcactgaggctgaagatatctgaagactcaactaggctgaatatccaaggtggcttttttgtgcccctgttggttcgttacctgggatggctgcagtagctgtggacccgctgagcatttctctctgtacacagccttttgatgtgattagatgagctgtctcacagcatggtggcctctaggcagctaaagttttggcatggtcgttgaccaccctaactgtgagcattcaagagacccgggtgtggtcaactaggctccttacagcccagcctgagaaatatgcagtgacacctccaccacaatccagccagctcggattcaagagaagggcacccctgggaaggtgaccactggccagtgtgtttcatcaggctggtgtctttgaagaccaaataccacaccacagccatttgaatttgtgtcattacttggtactcttattttttccctgctgctctttttgcattgaagtccttttgggatgacatcaataaaactatttcatgtttttaagattgtatttgtcaagtatttctttttcaacctttctacatgcagcctttttgttgtttttattcttcaggtgggtatttcataagcagtgtgtattttttcagcccatgatttatagaactagaatcctcagtctattgtcttaaatgtatttctgtatagttttctatagaaggtgatttcctgggttttgagttatgtttcttgcttggttttgtacattaatttttctcacattttggtttcttcttccctcatgcatgaccttatttttgttgactatttttctcatttcattattttgcctttcagaagtccgcaattcattttcattttttgatggttaactgtaacattttattatataattatattaagaaaatctgagattagtcttatctttaccattctcctgaagcctatgtgaactttagaacaattaacacctatggttccccttcatgatttccaatattttggatagtcagaatgttagatctaccataactagaagtattgttttattttaccaatacttaattacaattacctacctatgtgttaaccatcatctttaatcgtcattgtttttgcacaaaactttagtataccaactcagagcagaaagaggatccatcatattctgtgtctgccctattaagcatgcttctctgctgcatggcctttgattcctagtagtagatttatcccaggcaaagatgtagagccctattatgggctatcagatctcaacaccaaggatttcttgtgccacagccctttggtgccaggcctctgactctaacttctatctctttttccaacagttctcatggatactgaagtcccccagacaccaagaaaactggtcacattgactaattttaagagatggccttgaagtagtctcagaaaatgaaaagtcatagcacatactagctattgacaatgtatggttttggctatggcaaacccataacacaaatggaagtgtcagggaagaaaaaccaccatgagcattaaggaacaaaagaatatattataggaatgaggcctgacacaatttggggagaagatggataagtgaaagtttgaaaagggtcagaaaaaacaactctaaccagctctggtgaaggtggatgaactggacttcgcattaagttttgcattaagctgttatatccatacactatatggaaccctgaaggggctggtgtaggaatctatgaagatggctgactctatgtgccaatagccctgtgagttctcagaaaatttggtggtggcactgcagtccctcctggtcagcagggctggcagtcggtataaagagctggatgtgaagcaggggaaagtcagcataaattggaactcaccggcacttttgatgctactccttactgcctggagccagtgatgacttcagaactcagtagcagctgttttactttccccttacaaacttcctgcatttcttaccccatgatcaactctaacccggaaccatactaggaaaaaagttgtccgaaacatattccttgcttagctaagttgacacagtgataaaaccccacaagaatatccagatgctccttgacttgcagtggggtaatatcctgataaatccagcacaaattgaaaacatcataattcaacttacaatatccagcttatctgtacataaccccatcataagtcaaggagcacactgaaatgcatattgcttttgcaccattgtaaagttgaaaagtcattgaaccatcatgagaccatctgtacctgacaattagtgtttctcaaaataaataggaagattttcttctgatctgaaggtcttccagccactccctcccagacatatcataatattggaccagaggtcacccatagcaagctgtccctacttattctttgcagaaaaagtacagttacagtatgaagtggcctcattttaatgaggcccaacatacccaggaaataaaaaatgcagccacaggagcatacagatgccctttaatagatatgtcaatattaacataatgcaatagctatatttgttataaaacgatttcactattgcacaaacataatatgatgggcgaagtcttaatcttatcttttctagctacctatgccagagaagcagaactaaatattaaatgaaaggcacaattgagaggctgttataaaaatgaaaacatagggctttcaaaaaaactttccagctccttgtaattgctacatatttccaacatcgatccattaaaacaagtatcccagcctgttcaaatcaaagaatttcttatgcctcctagaaactattttcactgtccagtacttagtatgacctccattacaatagaataaatttaattattctcacaacctcaacagtgattaacacggaaacatacaagctaaattgagaaatattattagaatgtttagaattaagtccctttatatatgagggaaattgtcatgagatacacatgaggtaactatctcatttagaaaatgatgaagtggcttcaacatgattatgaagaaacattggacttccagccgaggcactggcctgtgctttatcaatatttatggtagtgccaacctgtgggtctagtgattaacaaccatgagttgtcttggtgttattactttgaggatatgaaacagaagcagcaaacagactccaatgccattcattacctaaacctacactcctttccttataggaaactcacttaagtcattacaatgctttatgtctcagtgtatctttaataaatttggaagttgaattgggaagtctttaggccactttaggcaatgtatgggttttttgttttcttttgatatggggtctcactctgtcacccaggctggagtgcagtggcatgatttcagctcattgcaacctctgcctcctgggttcaagcaattctctccctcagcctcctgagtagctgggattacaggtgtccaccaccacgcctggctaatttttgtgtttttagtagagatgggttttcaccatgttggccagattggtcttgaactcctaaccttgtgatccacccgcctcggactcccaaagttctggaattacaggcgtgagccacctcacccgacctgtatggttttttgacaggcagagatggacgtaacatcagtcatgggcaaagattaccaccagggggcagactagggcatccttgggattctgtgatcagtcatccctcctcgctggtgaatggaggcagtggtcacaactctccccagagaaggtggtgtgaggccatcacggaagatgctgctgcttctgctgcttctggggccaggtataagcctccttctacctgggagcttgggtgggcatgtgcgtgtgttggcatggtcaagtggtggccagcagggttgcaatgtggattgtttatgctcatcgaagggagagggagaggccctgctctctagaggtgtaaatggtaaggtgaaagccgccggtcagaggagatgggggattatggccctagggagatgacgggaagattgcacaaaacaaacaggactctccaggagctgggagcacagggagggagtgaggctcagctctgcctggcgtcctgtctgactcggctcccactgggctctcctctctctctggcttctgtctcagcaggctccgggcttggtgctgtcgtctctcaacatccgagctgggttatctgtaagagtggaacctctgtgaagatcgagtgccgttccctggactttcaggccacaactatgttttggtatcgtcagttcccgaaacagagtctcatgctgatggcaacttccaatgagggctccaaggccacatacgagcaaggcgtcgagaaggacaagtttctcatcaaccatgcaagcctgaccttgtccactctgacagtgaccagtgcccatcctgaagacagcagcttctacatctgcagtgctagagacacagcgccaggaggggatcagacaccgcggcaagaacccctgcagctgccctccgccccagcgggccccctgagtgctgagaggggaagcgtggagaatggaaaaccacagctttcctgactgagacatctgggagtgtgtgtgcagggggtggggcgggggggagggggagaaaaagaaaagaagcactgtgagtgtggagtatggaggaggtgtagtgtttgagacccacgaaatggcaatagagttgggcctaaagtggtcggcggacatggaaagttccctgaaaattataaaacctggaattttgccctgactctgccacattagtcatgtattcttgaatagatctacacataatcctagaggtagatatgaagacagttgtataatcactgtgtatttcctataataaacttcagcgattggctttcttgtcatcatgctgggctctcaagacaaagataaccaagaggcagccaagtagagagttatgcatgaatacgttaccttaggggaggatagcaacagcattgaatagcattcactccaaatttgtgttctgtcctccttagaccaggccaccaaaataaaatcctatcacatttcctgtaaatgttgaacgccatcatgttctccatggtgtttcggttgatgaatgaacagagtaagactcggtacaaagggaggggagcaccctctatgcctaggtacacaccatacggaatgtatcgctagggaaggtgctggtgagctggctcctgggaaaggtgtcaaggggaagagggggcagaggtacctagaaggaagacctcagacaacatggcttgtctacagagttggaaagttctgccagtagttagaagacagtaagtggaacagtgaaaatcctttcctaggagaaaccaaacatttacattgaccacaaatctgtatgaaccaacagaaaatgagcaaaacatatgaccatacatttaatagaataaacatatatgactaataaacatatagagatatttcacttcattgatgatcaggataatatgaagcaagacacaatgatacatagttttatatccacttgattagcaaaatataaaaagtttagaaatataaaatgttagcgagggtatggattcataggattacttataaattactgatgggagcataagtactatcaaccatttggaaacagttcagcattatctcgtagttgaagattcctatatcccataactcagcaattccactcctaggtttacatcaggagaagctcttgcatacacatatcagaagacataaataaaaaagtgttcttcacagcaccaaacagtagaaaaacatggcaccaagccacatatgcactgagaagagtgaatgaataaactgtgacatattcatatgagtcaaaatgaatgaactacagtgaagagcaaggttataggtgaatcttagcaatataatagcaaatgtaaaaactaagtctaatgagattatgcaaagcataatgtgcttttcataaagctaaaaacaagtcaagaaaataattttcaggactgaaatatattagaacaaattatattgaaaggaaagcaaagatgagttgtatgctggagcctactttatcagctcatgggagctgactgtatacatttttcccaactccagttttagtgacatcattttgttagcttgaaattggccatagtgagggtatttacactacagaaattagcaaacacagcaaattacggtttgctttattttcctccagacttagctgtcaaccctttaccctttaccaacacactactggcagggaataataatgacccaagttcaggatttttataaggctggggcatggcaggaaatagaatgagagagaactatatggctatacattgaaatattgtcaaggtctatcttgcataatgttgaggaggagaagttttacaagttcctattatgttttttaaaaatattcattgacaagcaatgcctgtgtgttatgaaccacaggttaagataaataaaattgaatgcatatagcatcaaaaagaagagaaaacaaataaatgaatagattagagttcttacaagaaaaggatcaagggcattttatagtcaaaaccaggagtgaaatagcagtggcttaactgctaccatcctcatatagatatcggctgctgaattaatcacagcggacaacctaccacccaacagacctggacccttgtcaaccctttgcaacacagaacaggggtttagacaataagggtgaacgtgaaagcgtggagatgacacctggcccctgaccaaggtggaactgactggaacaagatgggagccaattctgcagtgaacacgctgctgcttttcgtctccgctatgaccgtgtgttgctggtggttaaataccccacctgggttcagtcacctcagactgtgccattgccactgatctcaggacccactttagttgtagccttttactctgttagcgttttcagcctggagaacagagctagtaaaatacttataaaatattccactgcttcactaacggcatggaaaagacaagagcttttaaggctctggcatgaaacagggagacagtggttacattcctatttcacgcagtcactatttccgtctacgttaagctgaggagtgtagtgtttcggtgacatttagcatggaacgctgctgggttcagacctgacattcccaaaccagctgactgtcaaggacacagcctactgcctacctatattaccttaggaaacgagacaacagcattgaacagcattcagtccatatttgtgttctgtcttccttggacaagtaccaacaaaataaaatcctatcacatttcctgtaaattttgaatgacataaatttttgatgagcaattctttttgaagtgttgaactttctgttctgattttatattctactctctgtgctttgttgtatttaaaatcaagttcacctttcagaggcagtgatgggtgaggtaagagacagactcttacatcctcctccccaacacacacacacacacatacacacacacacacacacacacacacggaggcactgtttttcccagtaatggagaagccatgggaagaatttcagaggtttcaagggagctagggtcgtctaattcctctatatccttggatatccccattcttaatgtcaaaaataatctctcgaactggtttcccagagtctcaacccatttgctatagtacatgcaccatctcaggtgtccaaagatgaatatttgataagctacttctcaacttcatacctctgctgctgtttttccattctggaatgtggaaagcagtgtgactcctattaactgaccagtagtcaattttaactacccataaatatgtgagtgtcttttatctgtaatctcctatctggtgccatttttgaaaaccagttaagactcttttatcctaaaaaatgaactatgtctaatttcttgaaagtaattattgatgaaatactccctggagagtctgaagcccctgatattgcatatttaattgttatcctccttttaataaaaggtataggaagaaattttaaatattattcctaaataccttacatcaagatgagctagagttaattaagtgggacgagggataatgaattcaagggcatttaagaaagattaaagaaccagtgcaaaatgttttaatcaggaaagaaattagtgtgtttaatgacaggaaagaagtcagcagagtgacaggagcagggggaggaggtggttgagtacagggcaaaattgaagaaggcaggaaggcaccagaccactcagaaccttactggtcaaggtaaatgatacagaatccaacataaagcttaataggagacactgaggttttcaacatttgacttctttagtaatcagattcgtggctgtgtgtgtatctgtgtatttaatcaccctggtcacaaagtgaagaaataatggaccatgcagggaaggcaaaatgttacctctaccctcttgcagtttttcggctggtcctgagaatggaagattaacaggaaggaaagcatacacatgtatttaatacaagttttacatcacatgaaagcccccataattaaaggaagaactgaatgtgcagttagagttgaacattcatatattgaattgggcaaagggtcatacattgtggaaaggtgaaaaagtaaaggggcttaggctagggttgctggttgaatggcaaagtgactaggaaggtgaggattagtttaacaagctttttttgttacagattccttggcctcaacatcatcccattctatcttggatgttaagaatattcttttttcctggtatagataagacatcttttatatgggaagcttattccatttttcaagaagaaaaggggaagggtcagagtactcctcttatacttgctattgtgtttaatgcctctagctcaaaatattccttatgccaaagtggcatattttgggcagagggttgggaggcttatgctgccaccctccagcagtgtgaacagagttgatgcggaggaaaaacttagctcaggcaagcagtagtttagctcagataatgatgatggtgttagaaatatggggaaaatgagacatttaaaaggaagtaaatcaaaggacttggcaattgattagacatgagcagcaatatgcagggggtggtgggtggtgattaagagagactgctacacacagacaaataagaaggaccaagtgggaagaagatcaagatttactttgagattgggagtgccttagggacagtaatctaaccaggaatatgcagagagcagttggatgtacaagtcatggactcagaaaatggatctggataagaagcacacctttgggacatttagcatcactggaagaatgaaagtgcctccaatcccttgatatacagtttacaatgaaaagatcagagagcataggatagcggtttagggagcacacctgccttgggggactataaaaggttgagggaggcaaaatgcactgataaaccaccatcggcattagactaatggctgaataattgtgtaagtaattgctagtaacaatgctgtggagtatgtggcaggtagcacatcaagtgctgcttttttcttaatttcgctctgatacctggaatgcctttttgctgcctcgctgccgggcgggccactcccgactcaggcaggccgaggcagagctccgcgggcattggatgaattcgctcctttgaccactagagggtgatgtggatctttctataaaatatctgccgctcatcaagtggggactcacagcttcaccggatatttcagatgagatgtttaggtactgactgaccaaaaaaattgcagatatcctgggaggccaattggtctttaaaatggcaggatctaatcttaacattttgtaataacccttagcgtttacccatatctggcacctgtagttgtgtgatttctacacagttgataaatatataaatgaataataccgtgatttctattcaacattgtgctgaatttgcaaccagtgaaacaaggggaaaaagttgaaaatgagaaaggaaagaaaaataagtattggcgcacgacaagtttatttatagagattcaaaagggtctaaagaagcaatgcattatcaataacaaaatgtagtaagtttactgaatttaacataaatataaaacattattttattttcacatactacaagcagttatgttttttaacgagagacaatttacaaataatgatataaaatagaaaataaacacctaagaacaaatctattagattagcaagactatcatgcagaaaactattaaaattttaggggaatcagggccgcgctcagtggctcacgcttgtaatctcagcactttgggaggccgaggcgggcagatcatgaggtcaggagttcaagaccagcctggccaatagggtgaaacccatctctactaaacgtacaaaaaaattagccaggcatggtggtgcacgcctgtagtcccagctagtccggaagctgaggcaggagaatggcttgaacccagaaggcggagcttgcagtgaaccgagatcatgccactgcactccagcctgggcgacagagctagcctctgtctctaaataaatacatttaagggaattattttaaaagtttgaaataagccaggcgcggtggctcacacctgtaatcccagcactttgggaggccgaggtggctggatcacctgaggtcaggagttcaagaccagcctggccaacatggtgaaaccctgtctctgctaaaaacacaaaaaattagctggacatggtggtgggtgcctgtaatcccagctactcggaagcctaaggcaggagaattgctggaacccgggaggcggaggttgcagtgagctgagattgcaccattgcactccaggcggctgggcgacagaaagaaactccgtctcaaaaaaaaaaagtttgaaataagtaaagatatacaacatgatcatgaaaaagtgaatccaatagtaaggttgtttcaatttctgcagtattatctatatattcaataccacagtaatcaaactacaaaagatttactttatgaaatttgtcaaataatctacaactaagtgaaaaagaacaaaaataagcaatatttaagaagtacaaaaagtgatgtgaattgctctaccaattatcaaattatgttatcatttaggataatgaaagaagcgtgattaaataggcaaatggaaaacagaaaatgaaaaataggcccatgaatatacaggaatttcatatataatagaggtgttattgaagatatacggaggaatgatgtaatatacaagttattctggaacaggtggttatccatacaaggaaagatgaatttaaaccttacttcacaatatatgtcaaaataaatcacaagtgaattaaatgcttaaatgcaaaattcaaaatgttaggagttttggtaaataataaggattatatcttcatgaacttgggctatggaagattttttttaacaaagaattaaaaaacatgtttaccccaaataaaagaataatgcattctactaaagaaacccaacaaaaagtagcacaaacagaataaagacatacaccacaaattggaaagatattagcaacacacatagctgacaaaggttgggtatccagagtctagaaaaaactgttacaaataaataatagctaatcaaccaaaaagaaatatggacaaagggcagtttacaggcaacactggtggcctataatatatcaaatatattcaacctccttagcaaccagaaagaagcaaacaaaaactatattgcaccatgagataatattaacatactagactggcaaaattaaacgtatattaaatagcaagtgtagtcctagatgtggaacatctgaacacactcatgagctgttggtgggatcacttatttggcttaatcactttggaaagcattttgttatgttatgtaaagttgacatgttgacttgaaaactcagtctttacattgccaggtatggcaacaatcttgcacctagaaaagcagagacatgttcgagaatacaatactgtttgtagcagcacaaacacccagggaaaaattagtgtgcattaattcaagaatgaataaattctagccaatgaatataatgtaatactagatggcagtgaaagtaaattgtctagattgtgtgtcaacgtattatcacagacctaatgttgaatgaaaaaataacattgtagaaaatatataaactagctgattcctcttagatacatttcaaagacacacaaaattaaatactacataatttacagattcttgtgtaaatgctaaagactataatgccaagctagtgaatgacaaatttaaacttcagattacacctacctgggcatgacggagaaacaatgaggaaatctaaaagagtaacatggactgagaaattttcagcaataatctaactcttaagctgattggttcaggcaaaggtattcattttattgcttctatatatgcattgcatatttgtcataaatattgttctgtatagttcaacatttcattatttaatgtagccgggcacagtggctcatgcctgtaatcccaacagtttgggaggctgaggtgggcagatcacttgaggtcaggaattaaagaccagccagtgacatggtgaaagcctgtctctactaaaaatacaaaaattagccaggtgcggtggtgggggcctgtaatcccagctactcaggaggctgaggcaggagactgcttgaacccgggagacaaaggctgcagtgggctgagatcatgccactgcactccagcctgggagacagagcaagatccgtctcaaaaataaataaataaataaataaataaataaataaatacttacttaatgtaaagcagctgctatgtgattttataagtgtgtcaaaagctactatttgtaaagaccgagttgtatgattccttacctgagatggaagggaggggaagaagcaaactgacaagttaaaaaagtaaatagagtgtaaattagttcaaccattgtggaagacagtgtggagatttctcaaggatctagaaccagaaataccatttgacccagcaatcccattactgggtatatacccaaaggattataaatcattctactataaagagacatgcacatacatgtttattgcaccactgttcacaatagcaaagacttggaaccaaccaaaatgcccatcaatgatagactggataaagaaaatgtgacacatatattccgtggaatattatgcagccataaaaaaggatgagttcatgtcctttgcagggacatagatgaagttggaaaccatcattctcagcaatctatcacaagaacagaaaaccaaacaccgcatgttctccctcataagtgggagctgaacaatgagaacacatggacacagggaggggaacatcacacatggggcctgtcgggggatggagggctaggggagggatagcattaggagaaatacctaatgtagatgatgggttgataggtgcagcaaaccaccatggcatgtgtatacttatgtaacaaaagtgcacattctgcacatgtaccccagaacttaaagtataataattttttaagtaaataaatgtatgagtgattttacttaaaaaaaatagcaaaacagtgagtaacagaaaaaaaaaaaactaaaagcaggctgaaacttacactatttttaacagctaaaacaaagtctgccctcctacattctttgaaattgaaatgactctgtcccatgtacagagcatctacaaaggctatggaaagtgatcacgtcacaaggaggttgctgacgggggctaggagagtgggtgaagaagccttacagaaaaagctaccactacgatttctttctgagccaaccatgtgcctcagacttctctgctgtgtggccatttctttctggggagccaggtaaggccctgttctgaactggttgaatttcagttccaagactctctccggtggctgcagtatcaagctccctcctgcgctttttctacagctgctctctccttcctccacaggctccacggacaccaaggtcacccagagacctagacttctggtcaaagcaagtgaacagaaagcaaagatggattgtgttcctataaaagcacatagttatgtttactggtatcgtaagaagctggaagaagagctcaagtttttggtttactttcagaatgaagaacttattcagaaagcagaaataatcaatgagcgatttttagcccaatgctccaaaaactcatcctgtaccttggagatccagtccacggagtcaggggacacagcactgtatttctgtgccagcagcaaagccacagtgccgaatgttagcccttcttagaacacaaactcattatggacccagctcaggaaataagtgtgtagcaggttggtaggcactacgtaacagaaacccaacttgaaagacaataaatcagaaggaaaaacttgtaaataacagctctaagtgagcaaaaaacaaaggggggttatttaaaacaactgatggggacaaaaccccagggaaggggccagaaggcataaaaagcttggattcctcagtgttcagcatattaggtaagatatgctaggttaccctctctctctctctacatgagctttatggatttctaacaatctttatttaaagaaggggattctgtgcttttcacttggtaaagttgtgggtgcacaaataagaatgacaagcggatcaactgtgtctttcaggtagaccctgatcttctgacccagcacatttccttgaactagagacagactctaaagggctttttgactgcttctcacagctctccctgccatagaagcctagtgggaaccattagcaattcctgccctatggaatgttacaatcacaaatttttatttttatttatttatttatatttattttaatttttttttgagacggagtctcgctctgtcatccaggctggagtgcagtggcgtgatctcggctcactacaagttccgcctcctgggttcacgccattctcctgcctcagcctcccgagtagctgggactacaggcgcccgcaccacgcccagctaattttttgtatttcttttagtggagacggtgtttcaccgtgttagccaggatggtctcgatctcctgacctcgtaatccgcctgcctcggcctcccagagtgctgggattacaggcatgagccaccacgcctggccaacaattacgaacatttttaaagcaactctattgagacataagatatatatggaatatgtatgcaataaacaaatccaactgctgcaataaaacacacccgcattttaagtgtacacttcaacaaattttaacacatttttatacccatgatgtaaccatgatgacaatcaagatacaaaacattttcatcgtctcagaaagtccctcacatctctttattgaggtcttgttaatttctctcagcatcgctttgtattttttattatacagatcttatatatattttcctaaattttattttaacaagattataaatgtactcaataaaaatattttctgccaagatttcacgtcagcctaattcaatttcgtctttacatttttcaattgacatctctacctcagtatgttacataaaaataccttctccagaaattgcatatggtttggagcaaccatatgtgagctcacagcgtcagcctcattcaccatgtgaaccaatcaagtgttagtgctgctctgtttccaggtaaaatatacttatttacatgtattggaaaagctgtgaaatttctgcaaggtgtactttaagaagagatacattttgttaatgaaaacatacctatgcgttaagattaattaaagggaatattttgcagttaagcacatgatttggaatgaggggttgcagccctgctggtcaagcctctgaattccattcttgtttctcccataggccaccttcatcaggtctatagttctacaacacagagtgtcagtagtagggaacgttgttcatgtgagtgcagggaatacttgggattctgtagtttctgctcaactttgctgtggacttaaaattgctccaaaaatacaattcactaatttaaaaatggatccaagtattcagatggagaattaccatattggaggcacgaaatgggaacatactgttgaatctgttgcaatataggaagagtgtttaatgacataaactttttcattatttactcctttatctaggaaataggacactatttaacactgactacaatgaggatcttaaatacagtagaactgtctaaattccatcaataagaatagtgcatatattaccaatattgggatctgaggtgtctcagaattagtaacacatagtactgtagagattattttaaaacatagtgtggagataattttgtgattccattttaggaatactatttctgattacatggtttcttagcataaagccttactccttcatgcaagagagtatatactatcatactatgtccctgtagttttctattccaataatgctcctcaggaataaaatatacatgataatcatgatgatgatatggataatgatgaatataattgataatgcagacagtatgtagaaagatagatgatagaatttgtaccatgtttccaggactagaacacaatcatggtaagtataatataatacctgttataattgaagtctgtaaacagtctaaagaagtagtttaaattgtttcccttgacaccttgacaaatctgcaaactacacatataggctaagtacttccgaggctatatgaacgttctaaaaaacatttcctgtctgtggattccagcataatgcatattctcttctaaggcagaagtttttaacctgggatccgtggacctccaaggagtgcagagataaaattcagggaatcaataaatttgaatgggaaaatagatctttattttaactaacctccaactgaaatatacctttccttctatgatataatgagtaaaccatagtagttttagtaatatcagtgacaaagtcaatgacagaaatcacagacatttgcttatatgttgcatagatgacagttgatataaaagtcagatattttcataccatgttaaatgcagtaaatatactttcatcactatgttgaaatcatgacagttttcagattcagcaggttatatttcatataatgaaatttaaaggtgttcctatattaatatatgagaatttaaaaaaattgatatctgcatttcaaaataattttctatattctagtttatgcatttaaaatgttattctgagatggggtccttaggatttaccagtctgacaaagaggtccctggtacaatgtgaagaactcctggacacagaattagatcctcaacgcaggcatgattgacaacctgaagcctagacctacgcattggaaacaactatgttgcaagcattctttctcagagtttcacccacactgccgcacctcttaatgcttctcactctaaataattactttatattctctttctgtctctctcctgctctttgttttctctctctctctctctctctgccttgtttttcttctaggagggaacagcaacagcttctaaaccccaccagcttgcaaccaaaagtttcatcatgaaagcatcttttaattgcagataacctcagaaatagaacaacatttgtctaccaaaacaaaagcattcattaagaaatcagctaggatcctatttttatttactaaaactacttggaagaacccatgttatacaatgaatttacactcatacaaatttctactcagttggaaaatgagactttagtcagctggtacaaccctatgaccataaatgtctcatttcacttgatacagtattgacttcctaacttcctgtgaattagaacttcaggtccagaaagtaataagagcaaacgcaaatctagtgtttcttatgtactaagaactgttctaaatgctttatttatgtaatgttcatcacaggttttgggtagttacttattatctcaattttacagataaagtgaaattgaagagatgctctgtaacttttccaaggttacatagctgcgaaatggcagagacaggactaaagcccatgccgtgtcccaagtccctgctctaatccattgtcacaagggaaggggcgcttcagacactttgctattcctaaaattgcaggagtagcccccaccccatctctactgtattaattatttatagtgaatacagagggtgtagagaatcggttctttaaaaaacaaaaacaaaaacaaaaccactaaacttccaaaccccttcttgtgttgagttgagcacaggtgcatggcactctgtgtatgactctgaccaggaagtgagggattggctcttctgaccatgcaggcaggcacttgtccatttagaagggatataaaaagcttctataagcagaagaggaggtgcatgtgacttgatcgctctaattcttagtctcaccatctgcaaaatcagctgtgaaaatcagtcatcacgtagcaatgacaaattctttatattaagccccggggaggggctagatctcagccccttcccttggcctctctctctctcttagagcctgtgtctgtaacttcagagagattttgtcgctgccatggggagctgggtcctctgctatgtgaccctgtgtctcctgggagcaggtgagctcagcacacatccaggtggtcaattcctattctgggcttgccaggcccttccctggccagcacctcccttccaggcatgatctccagcctttgtctcttggacccttggatgctgacatctatcagatgccattccagctcactggggctggatgggatgtgactctggagtggaaacggaatttgagacacaatgacatgtactgctactggtactggcaggacccaaagcaaaatctgagactgatctattactcaagggttgaaaaggatattcagagaggagatctaactgaaggctacgtgtctgccaagaggagaaggggctatttcttctcagggtgaagttggcccacaccagccaaacagctttgtacttctgtcctgggagcgcaccacaatggaagcacaaccattgtctctctgtgcggaaatgtgtcctcaccctacagcccccaccacatcctctagcttaattttttcatttttaatattttcttgagattttactatgtcctgttacttttgcaaacacaaaagatacaaaactgaaaagaaaatagatcctttatccaaggagctaagagtctagcaataaagtagttataacagaatggaaaatataatgtataatactaaaatcagaagtcatttgggagctttagggaggacatgcccaattctgtctgattgaatcagagaaaacaaagaggaagtcacattagaacttcaccagctagacctggttctgagtagggcattctgggcaaagagaacagcttttgcaaaggcatattaaagagtttgtcactttggggaacagtttacaaagagaaagaagatgatcaatttatatgaatcaaaagaaatggaatacatttgaggaagtagacagaaaggagtttttgaaaaagttgagtttttggttccatgaatacaataagtatgaaagtcctttgtaggctgttgctcaaaagagagagctgaagcttcattgtcatcagcagacaagcaaacaatacaatttttcaatatatatatatattttcctcatgtaactttgaaatgatactatttttccattttcctcatataactttgatccttaacaaagggcacagtttcaaacaatatgaaatcatgttagcagtagcagttcccatttgggataatagggttcaactgtctatggaacaatgagataaaaactagaagcaggcaactgcatagacaagatgtgaaattgagatgccataaggctggactagaggttgagattctgcagatttcagcatgtaaataattgaactatggggacagaaaattccaaccaaatatagatttagatcacagagataaaaggcatggaagttaagactgtggtattctggttccttatggagattaaagaagcctaagagtgaggagtgattagaacatgggatgtaaaaacaaaagagggaaagagagagagtgagagttttgttttgtctagtatttgatatttctaagaaaattcgggaaaaaaataaaggtaacccaggcagaagaagccgcaaacacttcttgggtaacagggaatagttggtaaaatgtcatatgttagtttactgaggtgcacagaaccttttccactgaggttccttttggaaagacacaagacttagctaagattccaagaaatcaccaaagtaggaaatgaaaagcctccatgaatgaagttgcatgagtctcctaccagtggataaaggataggataggataaaagaatagctgcaaaggataaaagaatagctgaggcactgaagtagaagctccaagtgagaggactaaatctaacaaacatgaagaattattataaaaccacaacaataaaagtggtgtaatataagggcattgatatataaataggtccaaggaaaaaaatacatgttcataaacacagagcaatggtactgcaacaatcaaagaatataattttcaataaatggtgataggaaaattgggtatctatataaagaaaaataagtgcaattggacacatctcaatatatagccaaaatcaatcccagctatattaaaagcataattgtaataaaatcacaaggcttctagaatactgtataagagcacatcttcatggccttaaagcagggaaagagttcttattccctcaatcatagggaacagattgataaaaatggctatatcaaaattaacatattgaatttatcaatgttaattatgtaacagtgacaagattgactgtatagtgacatatcattaaatatctatatatttataccaaattaatatccctatttatatttatattttcaagaaaagctagtatataaattttttaaaaacctacaaactaatttttctacagatcaatgagaaaaaggtaactgtcaatggaaaaagtgagtgaaaaccataagcacctagcaaaatctcactggtcattaaacatgtaaatgtggctatatttaataatcagggaaatagaaattgagtccaacgaaatatatacccacaagaatggctacgatgataaaaatagtaactatcaagtgttggcaaggcaaagtgtcaacaagaactctctgaatcactggctagagtgtatatcggtagatccagtttggaaaacaatttggtattatctagtaaagttcaagatgtgtgtacccactatccatcaattccacccttgagaaaggcttttctagagaaacccttctacgaaaatcaggacaagaatattcactgtaatacatctgtcatggcaaaaacgtataaaatatccaaatgtaacttaagagaagaataaatcctggttattaaaaagaaattacacagcagtgaaaattcatgaactaaaactaaacacacaaacatgaatgaatttcacaaatttgaatgaaaaattacattgcagaagaaaggtacagtattgtctcgtttgtgtaaagtttgaaagcatctaaaactaaacactattttgtttgcttatgtgcctatgcattaaaatataaaagagaagcaaataattacaaaaacaaacacctcaatagagttagagaacagaggcatggaatctgggaaaagaaataagagctttcaaatattctggtaatcttttatttcctgtgccaagttgtttttttaagtgatcattctgttggtattttatcaagttattatctatatattcaaagtccattttgtaatgtggagaaaacaacctcactgaacaattaaattagtaaggagaaatctatggaaagatatacattaagctgttaacattacttacctgaaatgaggatgagatggaggaagagaaaagtaagcgaaaaaaaaaatcatcaaaaaatgcacaatttaaaataaatagttacagagagaaaaagcaaaaaagggaggttatgtaaaagaagcactagtaaatgaacaagctaaaatacaccagaaagagctagaaggtgaagtatttttcaaagcagtcactagtttcagaatcataaagatagcaattacaacagagatctgaaatatataaaagataattagataactaatagccagaaggaatgtccagtcttgagttagaaactgatgctcaaattaatggcaaaggacgtttttgaaacaactgtgaaactttgcataaaaactaaatagtagataagatgaaaatgcatcgatgagaaaggatgatcattaactgaaaaaaagcttatcaaacagaatttcaagaatattgtttactaaaaaaagtgtctatatatctacacatttatatatggggcagagaaggatctagaaagactcactaaggtgttaacagtgataattgctttctggcagtggtatcatatttttattttgttattttattttctaactttctaaaatatgagtgtattgcttatattagcaaaaatagacataacatatttttaaatgaatacaaaataactgagttatatttcctgagttaggataaaagctttttttccctgatactatgaagtgtttttgctcaggaacatgaagcaataacatgatgattataagtcagtggagggatcacgtcacaagaaggtgcagaaaggggatgaaaaagcctcatccctttgcaacgtcaatgcgatcatgggcaccaggctcctcggctgtgcagccctgtgtctcctggcagcagatgcgccctgagcacaaaagaaaaatccttgtcctgggcttgccaaccagcagatccaagctttgttttgttttgttttgttttgttttgttttgtttgttaagctctttcctggactctttctacagcatctgtttctttctcttacagactcttttcatgccaaagtcacacagactccaggacatttggtcaaaggaaaaggacagaaaacaaagatggattgtacccccgaaaaaggacatacttttgtttattggtatcaacagaatcagaataaagagtttatgcttttgatttcctttcagaatgaacaagttcttcaagaaacggagatgcacaagaagcgattctcatctcaatgccccaagaacgcaccctgcagcctggcaatcctgtcctcagaaccgggagacacggcactgtatctctgcgccagcagtcaatccacagcactgaaatgtcagttcctcttagcacacaaacttgtcacagacccagctcaggaagcaggtgatgtattaggctggaagggagtaacagaaaataactggagccagcttaagccacagtgtaatttaacacaaggataaagggtgtttagcagaagtcaagaggtgatagaagttctgaaaaggcaccactagggctgggctctagaatggctatctctccagcgctgatttttattcaattttggctgctgaatgcttttctctccctgtacaccatctctttttctccaggcctcgtggtgagaatgagatggtcactaaagattacaaattcagttgccatcatttccctacactgataaataccaggctggctctttctaagcctcaattcaaaatcccaagagaaaaaaacagatcagtcatgatccagccattaaccttctcacagagcactcagcaggaggcatgtatgtatatatttaaaatcacataaatattacttttccactcagctcaagcaagggaagtgctccgtttttctgtatgtacatttggtcttgttgcttctacatgatagagagtactcatacccatttcttcagaaatacatagccagattttctccagttttctgccagaattgaaaattcttgtacaaataccttcatagacttgtatgattgctttataggattatatacccagagcaagtcatgattgctgagacatggaattctatgcatattttatctatctaaataccaccacgggttcttcaggatcactgtatacatctgcaatcccacataaaagtgaatagggtgttttcctacatcctaatatctcctttaatccttatccagtgatctagattgttctcagtctagcaatgtaaagagattccaatctctgtctctctttctctccaccccccacccctgcaaccctctcacctactgccagaatatcatcagtgtttaccataaagatacaggtgacaattttttaaaactaaataaaaccaataatttaaaggaactgagagattacgttatactactataataataactggcagcaatctagaaggctgaataatgttctctccctccttttctttcctttgcaattttctaattactaatgagtttgagcacttcttcatgtgatagtggtcctggatttctgttctcaaaatggcctatccatatccgctggcaaattctctattgacagttctatattttcctcaatgatttgtagggggtcctgagatatacaagatattagtctcctttctgaaactttaggcactggaaataccaccacccaatatggcaccacctctgtcccagacttcaaagaatcagtagatgtgggaggaaccaggtgatctcttaccttagcaggtgcatgcgtgttatctccattatgtgaatgagacttctatctttcacttccactctgctgagtgctcaacttgctgtctcttccattattactcatgtctttaagcagcatagaaaagttaccagccatggctgtccccaaactactatcacccactgacaaccctttccatccagaactgctgaaaaaatgcttcactccatttagctgtgcttttttacaatatggggcaaatttgattcaaattaattcttattgctcttttctaagtgaattatgctgcctggttatagcaaaggacagaaaaacttcacacatctttttggaagacttaatacttgcccacacattatctcttttagggccaaattccatccactgcaaacacctatctccttgagctcttgatatgacagctgatccattttgatttcacaaatgcttacagagcaactcccattcactgagacataaaggcattcagaaactttcagctacactacatggaattttggtctctggggaaagggagaagagtaaaaagaaccataaaaatgtatttcaaataatgtgtataaggatgacaaaatatagattactttcatgaaaaacattagaacattatattgtctttgggagtgatttatcagtggataaattaaaacaaattcctgaggaagtttgggaaaaaaataaatttaggaaaacaaattttaaatgatttcctgaaaaccatcagggtttaccataaagttaacaattgaaaaaaatcaaataatttaatagtgaatgagaatatgaatacagaaaattcatatgaatatggaatgaaatattagtaaaaatgtgtttgagaacacttacaaatgaattttgttgtccaatttgattaagagtctagtcaaagtgttactcttttaaactacttgtaatagtgtcagtttgacaatctggaacaaaaacctttaaaatgcttatttttgggaatttggctctaaatcaaaatagatagttgttactgtacttgttctattgccttaagccactataaaacttgacaaaaattgtaagacaactatgttcagacatcagacaacaggcagtacacgtcgccatctctgggaaagaggaaacctagaaggggaatttcgctattgtcctaagactctgccttggtatgacttctgggctgcaccacaagtatatgaagcccaagcagtgggcagtggtctacccagcatagggaggcagagattgagttcagaagtatggacatggctgatagtgatagggataagctactgcagagaaggaagctatgcagaataagacctccaaatattttatgaggtccccttaagtctttggtcaaaaactaagcagcaaatgcatgggaaacgcctccataagacctggcagagaacagttgctgggtagttgtgagaggaatagagattctgacagtcatacgagcgtgggagacatgaatcctgactgggcagagctgagaggccttgctgaaacccctgggaatgcagctggcaccacataagggtcacatctcaagagaaggactaccaacgtcctagagtaaaccactccagaactgccctaacaaagctcagcaagtctcaaaaggatctcgctgatcttccaataagttcactgccttttgaagaaaaatatctcagcactctctaaataaaggcaaatataaacatatacatatatataatctgtagatatataagtctgtagagagatatgtatctctagagtgtcaacaatgcagcatctacaattttgatcttgacatgaaaaaaaatattagacatgggaagaactaggaaatgttacacatgggaaaaaaataaacaataaaaaccaaccctgaaataatacaaatgttggaaatttcagatgagaattttcaagcagttattatagaaatatgttcaagaatttggaggaaaatatggtcatgatttaatcaactgatgaaattgattaacccatagcaatcaagacaaaaaggggaaagacacaaattaccatatcaatgatgaaggaaagcatatgtctatagatacaaaagacattaaaatagcgacagaatattataagtatatgcaatacattcttcaacttagatgaaatgaaatttcttgaataataccacttaccaaaatgattcaaaatgaaataagaaatgtaaagaacttcaaatgaaggaagttaaattttttatcaaaagccttccctcaaaggaaactccagacctgaattatttcttcatgaattctattctaaaattaaggaaaaaagactatccatcttacataaattttttaagaaaatagaagaggcagaaacacttcacaacacttttataaacccagcaaaaacctaatgccaaaatctgtcaaatgcattacagaacagtatcttttatggctgcaaatgaaagaaaacttttcacaatatattaacaaattaaatccaaatatgtctcaataaaatactggcaaactggatccaggagcacatcaaaaagcttatccaccacgatcaagttggcttcactcccgggatgcaagggtggttcgacatatgcaaatcaataaacgtaattcatcacattaacagatctaaagacagaaaccacgtgattatctcaatagatgcagagaaggccttcaataaaattcaacatcatgttaaaatctcaataaactaggtattgaggaacatacctcaaaataataagagctatttatgacaaacccacagccaatatcatactgaatgggcaaaagctagaagcgttccccttgaaaacgagcacaagacaaggatgccctctctcatcactcctattcaacatagtattgggagttctggccagagcaatcatgcaagagaatgaaatacaaagtattcaaataggaagggagaaagtcagattgtctttgtttgcagatgacataatcctatatctagaaaaccccattgtctcagctcaaaagcttcttaagctgataagcagcttcagcaaaatctcaggatacaaaatcaaagtacagaagtcacaagcatttcaatacatcaacaacaggcaagcagagaacaaaatcatgaatgaactcccattcacaattgctacagagataataaaatacctaggaacatagctaacaagggaagtgaaggacttcttcaagaataattacaaaccactgctcaaggaaaccagagaagacacaaacaaatggaaaaagatttaatcctcatggataggaagactcaatatcatgaaaactgccatattgtacatagtaatttatagagtcaatgctattcccattaaactaccattgacattcttcacagaattaggaaaaactattttaaaattcatatggaaccaaaaaagagcccaaacagctaagacaatcataagcaaaaagaacaaagctggaggcgtcatgctaccggacttcaaactataaggctacaataaccaaaacagcatagtactggtacaaaaacagacatatagaccaatggaacagagtagagaactcagaaatggatcacacatctacaccatctgatcttcgacaaacctgacaaaaacaagcaatggggaaaggattccctatttaataaaaggtgtggggagaactggttaaccatttgcagataattgaaactagacctcttcctcacaccttatactaaaactaaatcaagatagattaaagattacatggaaaacccaaaactataaaaaccctagaataaaatctaggctatatcattcagatataggcacatagatttcatgatgaaatcatcaaaagcaattacaacaaaagcaaaaattgacaaatgggatctaaagagcttctgtacagcaaaagaaattatcatcatagtgaacaggaaacctacagagtgggagaaaattctgtagtctatccatctgacaaagatctaatacccagaatctacaagaaattcaaacaaatttacaagaaaaaaacaaacaatcctattaaaaagtgggcaaaggacatgaacagacacttctcaaaagaagacattcatgaggccaacaaacataccaaaaaaaaaatctcaacaccactgatcattagagaaatgcaaatcaaaaccacaatgagataccatctcataccagtcagaacagccattatgaaaatgctggcaaggttgtggagaaataggaatgcttttccactgttggttagaacataaattagtttaaccattgtggaagatagtgtggtgcttcctcaaagatctagaaccggaaataccatttgacccagaaatcccattactgggtatatatccagagaaatataaatcattctattacaaagatacatgcatgcatatgttcattgcagtactattcgtaatagcaaagacatggaatcaacccaaatccccatcaacgatagactggataaagaaaatggtacatgtacaccatggaatactatgcagccataaaaatgaatgagatcatgtcctttgcagggacatggatgaagctggaagctgttatcctcaacaaactaacccaggaacagaaaaacaaatgttgcatgttctcacttataagtgggagctaaacaatgagaacacatgaacacagggagaggaacaacacacactggggtctgttggggggtggagtggggggagggagagcattaggaaaaataggtaatgcatgctggacttaatatctaggtgatgggttgataggtgtagcaaagcaccatggcaaacatttacctatgtaacaaacctgcccatcctgcacatgtaccccagaaataaaaaaaaaagaaagtagagttgctataaagtacatctactgggggggaggtaaaaccagataattcactcaaattttgatgaacaaaagcttccaaaaattaattttcttcaaaaaatagaacatttacttttggatcaaaaataaataaataaatccaaatatgtatggatatatgtatatatttgtgtgcatatacatatgtgtatatgtggacaattctacaacatgtccaagggagtttattgcaggagaaacagtggtttagcattccaaaatcaatatacttttgctgtacagaagctctttagatcccatttgtcaatttttgcttctctcaactaatgtgatcaccaagaatagttcatattcagctcccaaatattaattccactcaaattactgcccacagcagggggcaccaaaacagcatgtttactttaagaattgcaaataagggcaatgatttttttttttttacgttgaagacaaagccaaaataaaagtttttatgatcattgtcttgtttatattcatcagatgcctggctaaggaatttactggaacaaatccgtattttcattcatattactaatggagaactctaaccaaaaagagaagaagggaggggacactggaatatgtcatctggagtgtaggcaaaggctgtaaaatgtgcttgggtactcctaaataaagcaacaactattcaaaattacacaggagaggcagaagtggtgaaggaggaggtagatgaacaagagaggccatgaggagttggtaattaccaaagatgactcatgtgaggacatgaaggctcattgtttattaagcctactttgtatatgtttgaaatttttagaattaaaagtaaaaatatctaaaaataagactttaccaatttgacatgcagcaggaatgattagggtaggatgccatggtgtatccatgcatgagggagggtcagtgatatggacaggagacggaaatactgggtagaagagggtggtttcccagcaaaggccccaccctcaagcctggagacctgcagctgtaaatggggacaagcattcctgttttcattcccaaaaagttgtcttttgacccaccatgccccctttcttttacccatataaaccccaaaccccaggcttcagaggcagagaagcaggctaggagacaagcagagggagggcagaacaacgtggcagagaaaaagaggaggaacgtctgaaacccgagaggagttcagctggaggtggtcagagaagagttcagtccctggatggccaaactccaaggggaagatcatcttctcactccatccccccttccagctccccatccatcccactgagagccactgccaccactcaataaaaccccacattcatccttcaagcccatgtgtgacccaattcttccaggacgctgggcaagagctcgggacacagaaagctgtcacactggccctctgcccttgcaaaaaggcagagggtccactgagctggttaacactcaagccgtgtgcagatggcagaactatctgcccacttgggctcctgcatctgtccctctgtgtgttccctttcccctcaggggtttgagcagttgcagcaactgaaaaggtgagcaacactcctgtcgcacgtccttccaggggggtcagggaactcttcctttttcaccaggacgagcacagatctgaagcagcaaagagccagttgtttattacattgaacaatgtttcacactatcaccataactgttctgtacttgcaatctgctgcattaaatattagctctttcctcctaaagtcaggaataatttgtgttagaataaaatgaattctttaatgaacaactgtattttcagctaattcaaaataggaatgaaggcgttaagtacttctttgaagcacatacccacattaaactaacatctttctacaataagccaatatttttaataaagctctgtgcccagaaaacattgaccagaaaagcaggagccactaaaaaataggagcaatttgaaacaaagttaggaatcctgtccttcttacaacaaaaaagtctcaaactttacagagaatgtattcaaattgcatagtttaccaagaactgagttagaataaatgattaaatgcagaaaaaaaggagaagagttataatgtcctatcattcaagtgagactagacttcctttattcgaaattcaatttggttttgaattttctccagcctgttttatcaggaggatgatgtcaccttgaacaactgaaatggatatgccctgagaaaggggagagatacaactctctggtggttgccagtaaagcgccagaaaaacagaagagaagcaagtagaagaatttcagcatctgctaagaacatataatacataagccaacatggcatctttctttaagacccagtaccttgggagggacaatgacatcacttcctgaatcctcccagttttctatttccatgccctgcttccctcaacatccagagctggaaacacctccatcctgcctcttcatgccatggcctccctgctcttcttctgtggggccttttatctcctgggaacaggtgagtttggaacacagatggggaaatcactgccttaaattttccaggttctgaattaagcctatcctcagagattgcagcacgaggatatttaccagtttctgtcttcaatttctgtcttatttcccacagggtccatggatgctgatgttacccagaccccaaggaataggatcacaaagacaggaaagaggattatgctggaatgttctcagactaagggtcatgatagaatgtactggtatcgacaagacccaggactgggcctacggttgatctattactcctttgatgtcaaagatataaacaaaggagagatctctgatggatacagtgtctctcgacaggcacaggctaaattctccctgtccctagagtctgccatccccaaccagacagctctttacttctgtgccaccagtgatttgcacagtgcttcttggccacctgctctctacacagaaagacagacacatgggtgagttgtttgctctgaagggtacctggatgtgggttgtgggatgtggggtgtttagagctttcagtggtcttaggtagtgtgagctaagggccactttggatcaatgtccccaagccatgtgatgactctgaaagcacaggctacactgaatcaatctcccctgtctatttatttttcctagggagctagacgaatggtgacctttcaggagaaggaacttgagcatttgacagaagctcatgattttcaacaagagcatttcttatgagctgaatacaatgcagtttttatagtccttttgccattatttccacccactttgcaacatcccacactttgttctgttcccactgacagctcctttatcctgtctaacctttctctgccccagttcttccaagctcagctccaccatttagctctataattgattgcctttctactaaaaacaaaataactagcttgttttctaaaacttcactgtaagtaaatttaattgtcattaaatctgactcagaagttaaagttcaagtaacagagactgtgatttacaaaagtaatttttcatctactaccccacactttgatctctgctgagattcattttaacctgcaggtgcagatagacttgcattattatctggatgtactgaatttcaaaaaataaaattccctgtccccagtatgaggtcaaagctaggagcttggaagtgccccttgtttccaggcactagaataattccctggttcccctgctgtggggattcttttaggagccagtgaggcccaggcacaaaaataattgatcaaggactgccagagcttgacgtaaaagtcttcctgagaatcaagttgatgtcttcctcatggatttagtcttcttgtcccataagcctcaattatttcagcaaacgaatccatgggacttggtgactgttcagaaatgaagaatccaacttgttcccttttctacctgttctcatgtgtaaagcgtgttacttttagggattctttctcattggcttccatttaaaaaacaggtttctccagagttttgtttcctgctttctatgcacacctcatcaagtcttatcagcaataataattcttcccttacaagctgttaactgtcccagttaattgtctcctggacatttctgatagatttccccaggatttttccttctgccctcctttttcctcagtacacatgtctttcctcaaccttcgcattcattgtcatgacaacttctttcataggttcctgcctggcaaattcaactatctactggacacttgaagctggatgctccataggcaattcaaactcagtttatccctgaaataaactgcctctccatccttgcacttgcccattttggccacacactgtatttctatctcagtgattggaacagcccttctaggttcctcatttttgctatgcctcatattaaatcagtttctaaatctattacttgtatatcacacattgtcatagtttgtgttctccaaaagcagattttgagaggaaaattagtgtgcgggaaggtttgtggaaactgcccttgcagtccacgtgggcagagggaaatggggcagagggagaagttgggctttgctgtatcctcaacaaagtccttcactcaccccacagggagctctgagtctggatggtcctttagtgccatcccaaggtgagatggcaggtcttattcccactttccttgtaaccatgtcattatatgtgagttgctctgagaagcactcatgaatttgatggggaggaagtgtctctttagaacaagaccattcacagagagatgtcggcatcacagtttctaatatacacatatttatctgattcagttacccctctccctcctcattgcttctacctcagtgcagaccctcatcactcattgcctagaaataaatgcaatgccctctccctggcttactagcttcttacccctttcccttaccctatttctcacattgccaccagcatgaccacatatgacattcctcacacaacacacaaagccctttggaaatggttctccaactaaacatctggccaaattggccgaattcactccagcactttagactgtagctgaactgaactttttatatttccctgaatataccagcctgaattgcacaggtgtacctttgccaaagctctttccttcatctgaaatgagcttctttattccttttttgtcaaaactaattttttaattgcaaattttattacagattagtgggcacatgttgtgcaggtttgtcacatgggtaaattgcgtgatgctgagacttcaggtcccaacaatcccatcacccaggacataagcatagaatccaacaggtgattgttcagcccatgccctgctccctccttctcccatctagtgagccccagtgtctatggtttctatctttacaatcatgtgtattcatttagctcccacttaaaagaacatatagtatttgattttctgttcttgcattaattgcttaagataatgtcctccagctccatccatgttgcataaagggaatgattttgttcttttatggctgcatggtattccatggtgtatatgtaccacattttctttatccagttcactgttttgtttttttttttttttttttttttttgagacggagtctcgctctgttgcccaggtgggactgcggactgcagtggcgcaatctcggctcactgcaagctccgcttcccgggttcacgccattctcctgcctcagcctcccgagtagctgggactacaggcgcccgccaccgcgcccggctaattttttttgtatttttagtagagacggggtttcaccttgttagccaggatggtctcgatctcctgacctcatgatccacccgcctcggcctcccaaagtgctgggattacaggcgtgagccaccgcgccgggccccagttcactgttaatgggtgcttaggttgattcaatgtccttgctattgtgtatagtgcagcaatgaacataatgggtacatgtgtccttatgacagaataaattatttccctttgggtatatatccagtagtgggattgctgggtcaaatggtagctccattttaagttctttgagaaatctccaaactgctttacacagtggctgaactggtttgcattcccactaacagtgtataagtgttccctttcttctgcagcctcaccaacatctattgtttgaaataaatcttgagtgcctggctaatcctcacatatcctttaattctcagatcaaagatgagcttatctataacagtttttccaatgtctgtagacaaagattcagcttttctcttgtgtgtgatagtttatgcatttcaaagttatcatagttgttatgtcccttcatacttctttaacttttattttgggttcatggggacatgtacaggtttgttataataaacagttatatgcaaaactgtgatgctgatctctttctttttatggctgcatagtattccgtgatgtatatgtactatattttcttcatccagcttactgttggcggccttttaggttgattccatgtgtctgctattgtgaatagtgctgcaatgaacatctgtgtgcatgtgtctttatgatagaatgatttctactcttttgggtatatgcacaataatgggactgctgggtcaaatggaagttctgttttcagttctttgaggaatcaccatactgctttccatgatggctgaactaatttacactctcaccagcagcatataagcaatcccttttctcagcagccttgtaaggatctgttattttttgacttctgataataaccattctgcctggtgtgagatggtatctcattgtagttttgatttgcatttctctgatgattagtgatgttgagcattttttcatatgtgtgttgatcacatgtataccttttgctgaaaagtgtctgttcatgccctttgcccactttttaatggggttatctgttttctgcttgtaagtttaagttccttatagaatctggatattagacctttgatgcatatatagtctgcaaatattttctcccattctgtagtttgtctatttactctgttgatagtttcatttgctgtgcagaagctctttaattaggtctcatttgtcaatttttgatttttttgaaattgcttttggtatcttcatcatgaaatctttgccaagtcatatgattaggatggtataatatttcctaggttatcttccaggggctttatagctttaggtttatatttaagtctttaatccatcttgggttgatttttgtatatggtataaggaagggatctagttcaatcttttgcatatggctagccagttatccccagcaccatgtgttgaataaggagttctttccccgttgcttgttctagtcagctttgtcaaagaccagatggctgtaggtatgtggcattatttcctggctctctattctatcccattggtctatatctgtttttgtacagtacaccatgctgttttagttactgtacccttgcagtgtaggttaaagttggtaacatgatgcctctagcccttgttcttttgacttaggattgccttggctatttgggctttttggttccacatgaattttaaaatactgttttttctaattctgtgaaaaacgtcattagtagtttgataggaatattaggttggtgcaaatgtatttgcagtttttgcattgttggaatttgccatttggtattgaaatacattcttaagtaaatgtggttatgttatacatcgttttaatgaacattttcactttatgttttttgctaattacttattacttgctacttatttggtatttattttagactatacacatggtgttagacaaaaagcagatttgagtgattttcttattcaagttcaaactgagtcataaagtggcagagataacccgcaacatcagcaacgcatctggcccaggaactgctaatgaacatacatacagtgcagtgttggttccagaagtttttcaaaggagacgagagccctgaagatgcagagtatagtggcaggtgatcagaagttgacaatcaccagttgagagcaatcatcaaaaccgatcctcttacaactaggcgagaagttgttaaagaactcgaggttgaccactctacagttgttcagcatttgaaacaaattggaaaggtgaaaaactcgataagtgggtgcctcataaagtgagcaaaactttttttaaattgtcattttaaagtgtcatctcttattctatgcaataacaacgaaccatttcttgatcagattgtgacatagaatgaaaagtggattttatatgacaactgccaacaatcatctcaatggttggcccgagaagctccaaagcacttcccaaagccaaacttgcaccaaaaaagtcatagttgtgggcgggaagcctcccaggtgccgaggcaagagaccgaggacacgagctgctccagtataataaaatataaaataagaatagttataccagatatagatcttagatatgattatatatgaatatcattaatcattagtttgtagcaattactctttattccaatattataataatcctcgctctataatcataacctaggaaaaaccagggtatacagagttaggagctgaggagacatagcgagaagcaaccagaaaagagtgcgagccttctgttatgcccggacaggtccatcagagggctccttggtctagcggtagtgttagcgtcaaggaaaaacacccgctacttagcggaccgggaaagggagtctccctttccctgggggagtttagagaagactgtactcctccacctcttgtggaaggcctgacatcattcaggcccgcccgcggttatccggaggcctaaccgtctccctgtgatgctgtgcttcagtggtcacgctcctagtccaccttcatgctccatcttgtacacctggctctgccgtttacttagcagtagcaaattagtgaaagtactaaaagtctctgataagcagaataatagtgtaagctgtttctctttctcctctctctctctgcctcggctgccaggcaggaaagggccccctgtccagtggacacatgacccatgtggccttacctatcattggagaaggctcacatgccctatcctgcccctttgtcttgtatccaataaatatcagcgcagcctggcattcggggccactactggtctctgtgtcttggtggtagtggttccccgggcccagctgtcttttcttttatctctttgtcttgtgtctttatttctatgctctctcatctctgcacacgaggagaaaacccaccaaccctgtgggtctggaccctacacgtggtcactgtctggtggtctgctgccagtgtgatccaccacagctttctgaatcctggcaaaaccattacatctgagaagtatcttcagcaaattgatgagatgcaccaaaaactgcaatgcctgcacctggcattggtcaacagaaagggcccaattcttgtccacaacaacatctgaccgcaggttgcacaaccaatgcttcaaaagttgaataaattgggctacaaacttttgcctcatctgccatattcacctgacctctcaccaacaaactaccacttcttcaagcatcttgtcaactttttgcagggaaaatgcttccacagccagcaagatgcagaaaatgctttccaagaattcactgaattccaaagcatagatttttatgctacaagaataaacaaacttatttctcattggcaaaaaatgtgttgattgtaatggttcctattttgattaataaagatgtgcttgagcctagttatgatttaaaattcaccaaaactacaattacttttgcgccaacttaataccatcgaatctacattgctttggccagtaaggccattttaatgatattgattcttcctatccatgtgcatagaatgtttttctatttgtttttgtcatctctgatttctttgagcagtgttttgtaattcctgttgtagagacctttcacttctctggttagctgtattcctaggtatttgttgtgtgtggcaattatgaatggaatcatattcctgatttggctcttagcttgtatgtttttagtgtattggaatgccactttttaatgttgattttgtattttaaaactgctgaagttgtttatcagatcaagcagcttttgggcagagactatggggttttctagatatagaatcatgtcatctgcaaatagggatagtttgactttctctcttcctatttggatgtctatttcttccttctgcctgattgccctgaccaggactcccagtactatgttgaataggagtggcgaaagagggtatctttgtcttgtgctggttttctttttatactggctcttcacaaggctatatatattctttagttaaaagtagacatctcgatggaccagtgactatcaccctattaatcagtcatgggagcactgctgtgcatttggtattttaactttcgggtatgctatcacatcacagaaggcctggtcccctccccatcacctgcagccggacctgtctttgattcctaccaatcacctatattaattgtgcctaaattcaatattccgacagggcataactaccctaaggtgctaattaattcatgcttgaaggacataacagtaattaacagacaaacacatacaaccgctccccttattggacttttaaaatgaaaatctgcaacacccccctgccccatctctgacttcatcaacccaggaaaaaagacaccttgccaaacttcaaaaacaagtaagccttaattcaactctgccagagcccaaaatatttgtattttagctttgggtatccccaacagctacccctcaactaatgcaaatttttttaggaaactaacccctcaccaatctaattctacttttacaacaattatatctaacacgcacgcccatccattactaagcccatatcctaaatttacacaccccgaaaggcatcatctgtcaccttgtactacaccaaccactcgcgagtactaaaatctactccaccaactcctgctaactcaactttaaatccctgaaccctacaactgtgcatattgcctgtatcttcttctatactccaattttgcacttaacatatatacagttaatgtagcttaattatttaaagcaagacactgaaaatgtctagatgggcttatacagccccataaacagacagtcttggtcctggcctttctattaactcttagtaagattacacatgcaagcatccccatcccagtgaaagtacatctaaatcaccttgatcaaaaggagtaagtatcaggcacgcacaaatgcagctcaaaacacgttgctcagccaaacttccacgggaaacaacagtgatagacctttagcaataaacaaaagtttaactaaactatactaatatccagggttggttaatttcatgccagccaccgcagccatacaattaacctgagctaatagaactcagcataaagagtgttttaggtctatccttaataaagctaagcttcatctcagttgtataaaacccgggctgaaataaaataaactatgaaggaggctttaatacttctgaagacacaatagctaagacccaaactgggattagataccccactaggcttagccctaaactccaatagttaaatcaacaaaactattccccagaacactacaagcaatagcttaaaactcaaaggacttggcagtgctttatatccctctagaggagcctgttctataatggataaaccccaatttacctcaccacttcttgctcagcctatataccatcatcttcagcaaaccctagtaaaagtcacaaagtaagcacaagtatctacataaaaacattaggtcaaggtgtagcccatgaggcggtaagaaatgggctacattttctacacccagaaaatctcacaacccttatgaaatctaagggctcaaggaggattcagcagtatattaagagcagagtgcttaattggatgaggccataaagcacacacacaatgcccatcaccctcctcaagtatcactttagagattagtttaactaaaatccctacatatttatatagaggagacaagtcgtaacatggtaagtgtactggaaagtgcacttggatgaaccaaggtgtagcttaacacaaagcatctgtcttacacccagatttcaccataatttgaccaccttgtgccaactctagccctaaacttaactaatagtactaccgaataaccttaatcaaaccatttacccaaacaaaagtataggcgaaagaaattttacccaggcgcagtggacgtagtactgcaaggtaaagatgaaaaagttaaccaagaataaaatagcaaggatagacccttataccttctgcgtaatgaattaactagaaataactttacacagagaaccaaagccaaggcccccaaaaccagacgagctacccaagaacagctaaaagaacacacccatctatgtagtaaaatagtggggagattcatgagtagtggtgataagcctactgagcctagtgatagctggttgtccaagatagaatcttagttcaactttaaatttacctacagagccacttaatccccctgtaaatttaactgttagtctaaagagggacagctctttagacattaggaaacaaccttcatgtagagagtaaaaaacattatccccatagttggcccgaaagcagccatcaattaagaaagcattcaagctcaacatccaaccactctaaattctaatcacaccactgaactcctaacaccacattggactaatctattactttatagatgcaataatattaatataagtaacatgaaatattctccactgcttaagcctacatcagaccagaataacccactgacaaattaacagcctaatattaataaacaactcaacaaatttattattaccgatactgttaatccaacacaggcatgctctaaggaaaggttaaaaaaaattaaaaggaactcggcaaattttaccctgcctgtttaccaaaaacatcacctctagcattattagtattagaggcaccacctgccagtgacatatgttcaacggccacagtaccctgaccatgcaaaggtagcataatcacttgttccttaaatagggacttgtatgaatgaccccacgagggttcagctgtctcttacttccaaccagtgaaactgacctgcctgtgaagaggcgaacatgaataaataagatgagaagatcctatggagctttaatttattaatgcaaacaaagctcagataagcccacaggccttaaactactgtccctgcattaaatattttggttggggtgacctcggagcataatttaacctccgagcaacctatgctaagactaaacaagtttaagcgaattactatacatatattgacccaataatttgatcaacggaacaagttaccctagggataacagcgcaatcctattctagagtccatattgacaatagggtttacgacctcgatgttggatcaggacatcctaatggtgtagctgctatcaagggttcatttgttcaatgattaaagtcctacgtggtctgagttcagaccggagcaagccaggtctggtacatgtgtatttaagtcctccacacctcccatctataagtctttttaaaacaaagaaaatatgtttggttaagagaaggctggaaatgagagagggagttttactggacaaaaaatgtatagagacttatgtaacaattattatctgatattaatatctgatggtaatacataattgattgagaactagggtgaagtgacataatcccaaacatacatgggagaacgttcggggaaatcaaagctgtttttcttaatggaatctgagttctgagaaagaagacatgcaaaggaggatgcaaatatatgaaaatatatgaaatatttgttgttttaattgttaacacaaatttatatactcatatatttgagtctaattagaatatttaataagttaagtttatgcctggagtcctagttttagtattacaggcaaagaagcagagttagaaggaaggaggggaatgaattatgcatgctgtatttgagggcctttggaacttccgaatgctggtagagtacacagttggcactctgtatcaatggggtcctcatttgcagatttagtcaacctcagatgaaaaatatattttaaaaattacaaaataacaacacaacaaaaaaaatacaaaatctaaaacactgaggtataccaactatttgcatgacatttacattgtattagctattataagtaatctagagttgatttaaagtatacaggaggatgtgcctaggttatatgcaaatactgtgccattttatataagagatttaagcatcagtggatttaaactaatcccccatgaataccgagggaccactgggttgagaacatggtgctgaagctcataaaaagcccttgctgtgggattctgacataagacactgcataaaagctcaacacacatgccctatagtcagtgtctgtgattctctggaatcaaactctattctgtgaaaacaggaaccgtgatggtacaggctattcttggcaatgggaaatgaaacctcagaggtaatcctacttccatgtggtgcagagccctgagctaggagatgtttatcactgtttgggaaaccagaaccctcagcctttctcccttctgcctcgcctgaagacaggtgagtcctttgccataatatgaagtcttaatttagcattgccacattctggttccagatctttccctcctggctgaatattaagattgcattttgtctcttgtctttcttggtatctcttccctatgcaaacttcatggacactggaaggactacaaaatcctgaaaatcaagaaacctccattgagaaagggggttttactagaacaaaaatgtgtagagatatatacaaaaattatatataataatgtctgtctctgtaattattcacacttagcaattcccagcaccttctccagaggacttccctaactaaacaagaaaggtagtctttggggaaagtgttttcatcaataaaagacaagctatgtgtgagttattcctgcactgggcagcaaggagtgggtagttacctctgccttcgagtaccccttcatttgactaggacctgagactctctcatatctacttccaagcccaggttgagcacttcttttctttcctttctttagttgcttctactgtgaggtatagattttacatccagtcactgctgaagactttcatcaactcatcactcatccttcagtcatctcacactgagaacaactgggagcctcccgttttcctgtttctttaacatttgtcagaatctccccaaacctctaacacctttttttcagcagggggcagtaaaattcaatttattttttctgttctcagcacttactattaagaccagatttcatagtaaagtctaaggccaaatctcattaatgattttaatggttacttttgtcttaaaggagcccctgataggacaagagtatttcagggtttggtaaatcaaaactgttatattccttcgtgacacatgacagaggaagagtaagcaggggcccacatgtgttacatgtaaatacatacagacttgaagacatggtgttcaaatagtagagatataatagtaaaaacccaaagcctatgtcagcatcatgtgaacaaaaattttagtaaataccaactgtagatcttagtgaactagggcaaaggaagtggacaacactgggagaaattctgggattaatctttgtatctcacaatcaaaaccaaagacttttctgttaagaagaaatgggggaaagggcggagggagaatggcacttggtttagacattgtttactgcagcagcacccaaaccatttgtagcagtattaccaaagcatgtattggattatattttctgttctgtcatgattgatagtgcaattaaaggcagatggactaaaatcatcctaggcaaaggctaagttgataaagctgataaagcctgaacaccaagtcagtgaaaaatgagactgagaaagttattatcacacaataataacaccattctgaggactcagtgaattccagttactgctccaagctctttacatgtgtctatataaatagattgccccgtttaatgctcacaagttctcctgctccttgtctgatcaagccacgctgttcactggttccctcttctgcatgttcttctctcttgggtttgcagagttcattcctgttcatccttcagaacccaactcaaatgccacttcctttcccaacctttttaattaggtaaaatcttgctattacaggcactcaaagctatgtagtttttatgttcatagcttacaaaacagttgcaatggaatgttttgtaagaatattaaagacttgagttaagataagcaaagcatcaagcctactttggatgagggaagtcaacaaaaatattactcatttgatgggttaaaaggatatagatgaaactgtttcaacaggatgtctgtgggacccaggaagtttgcaggggctgtgtcatcacacacacacaatgacattatcaagagcccatcctgcttccccactactgggagacatcctctctagccccaactgtgccatgactatcaggctcctctgctacatgggcttttattttctgggggcaggtaagtcatagacacagttcattccaaaatctagaaggaataattcctctttgttgggtttgtgcctggctcagcatcaaagtccatcgtgaactctgttaccaatttttgtctcttcccataggcctcatggaagctgacatctaccagaccccaagataccttgttatagggacaggaaagaagatcactctggaatgttctcaaaccatgggccatgacaaaatgtactggtatcaacaagatccaggaatggaactacacctcatccactattcctatggagttaattccacagagaagggagatctttcctctgagtcaacagtctccagaataaggacggagcattttcccctgaccctggagtctgccaggccctcacatacctctcagtacctctgtgccagcagtgaatacacagtgctacatggataccgacactccgcacagaaagggtcgcctctaatgtgaggacatcttgcctccagaaacctcatcttaaactacagaaacccctacaaatcttcccagactcctcagccttgagggaccagtgtgctttaagtaacagtctggactaaagactatctctggctcagtctctaagaagctgagaaatgacccagccccacagtcatcctagctgactttttccttgcatctagttgttgttgttcaattgagcttgcacaaattttatccttcaagataaatgcgataatatttgacagttaccttatggctagctgaagaaagtctttgtcagctaagaaacaggaaaaggatcctttgactttctacacaggctgtctttatctctggttcatggtttcttcctcatgttaaacttgttccttcatacacagccacacaaagtccctgccctttcctgaccccagtcctgcacctgacggcttcagttcctcaatctatgactttgaacttagaataaaattttattttcacttgaaataagtgattaatgattattttcactaatatccctctaaataaatgtaattttagctatatctgcatgaggcctaaggaaaagaaaaggctccaactttggcaaagaatagtctttaacaatgtccctggattcagccctaaatctctttggagactacccttagcattggaagactatcccacggctaggtgattcttctgtcttggatatgctgaatctcagggaagtgttctctatccacatgagatcagacctgggaccctgaatagatttatttttcacagaagtatagactgctgtggagccctgggtgctgagctcagatgtgaaatctctgttttgaggttaccaaaaagtaaagtcacagagtctctgtcctggttttgcctccttaaaaagtagctttaatatgttagaaaagaatctagaaaacatcatacatattttattataaaagtcatttcttgttcattcttcttttctgtttgttttctacgatactagccattcctcactcttctttgtaggctctttctattctcattttccttattttgaccttatttctggactttttgttcttttcctcttaacctatacatacatcttagacaatatcatccaatctatttcttgaagcatatgtctcattagtttcaaacttattctctagctgcctactagatatttccacctctatatttcataggctcctcaactcagcttgtccccaacagagttcatcatcctcccaatagcatatcctcttttggagacaccatcatcttgggaggctcatctccaatggtcaggtgtccttagcaaacacctagaagattaacaaccctccttactgaactcttagcctcgtgccttacccttctggccttcttgcaaaagtgatatgcatcagagagttggccctctgtattcatgagttccacatccctggattcaaccaaccacagatcaaaaatatttttttcaaaaatcgtgtctatactgaacacatacagacttttttcgttgtcactattctaaacaatacagtataacaactatttacataacattgcattgtatttggtactatgaattatttacagatgacttaaagtatatgggagtatatgcatagattatatgtaaatactaaaccattttttatcagggacttgggcatttgtagattttgttatccttgggaggtcttggaaccaattcaccaagacactgagggataactgtagacaaatatgatcatgctactggatcccttcaccatttctccatgcttctccctcatattcaagataaaatttaaatttcttcacctggcttaatggtattttgtgatctggactccagaaattagcttatcttgaacaccttatcctagctatttttcatcctggcaatcctgaacttctgaccattttctatagtccatgttctcttacccatctgagaccctgtacccactgtccctctatctctgaagtctgcacttcttgtctacagggctgactcctactccagcatctcattaatcactatgctaacacaagaagtcttcatctgcttcagttctcaaaagaagtgaaaagcagacacttctcaaaagaagacatttatgcagccaacagacacatgaaaaaatgctcatcatcactggtcatcagagaaatgcaaatcaaaaccacaatgagatatcatctcacaccagttagaatggcaatcattaaaaagtcaggaaacaacagatgctggagaggatgtggagaaataggaacaattttacattgttggtgggaatgtaaactagttcaacaattgtggaagacagtgtggcgattccttaaggatctagaactggaaataccatttgaaccagtgatcccattactgggtatatacccaaaggataacaaatcatgctactataaagacacatgcacacgtatgtttattgcagcactatttacaatagcaaagacttggaaccaacccaaatgtccatcaataatagactggattaagaaaatgtggcacatatacaccatggaatactatgcagcaattaaaaaggatgagttcatgtcctttgtagggacatggatgtagctggaaaccatcattctgagcaaactatcacaaggacagaaaaccaaacaccgtatgttctcactcataggtgggaactgaacaataagaacacttggacacagggcggggaacatcacacactggggcctgtcgtggggtggggggagtggggagggatagcattaagagaaatacctaatgtaaatgatgagttaatgggtgcagcaaaccaacatggcacatgtatacatatgtaataaacttgcatgttgtgcatatgtaccctagaacttaaagtataataataaaataaaaataaataaatatttgtgaagttataaacttttatttgcaaggtatctagaagtggaattactgagtcatagggtaagggtataataaattaaaaacaaaaacaaaacttgtaaaatgttttcagaattggctatttcattttacatttctgtcatcaatgtgtgaggttccagttttttcacatcctctccaactcttggtcttttttaataatcatgattctggaaaatgtgtagtgtcatctcactgtggtttttaaattttgtttctctaataactaatgatattgagcatctttttgtttgcttattggttattcctatatgacctctgatgacatacctattcaaatcctttactcattttaattggatggtttgtctttttatttactgagttttaactgtcccttatcagacgtatgactttcaaaactttttttcctgctctgtgatttgtcttctcattttcttaacaggtgactttgaagataaaccattttttattttgatgaggtccaatttttcaatttatcttttatgaattatgcttttcctgttacttctaagaaataactaagccaaagtcataattttttttctgtcttcttctagaagtttcatagtcttttggctgggtgtggtggctcaagcctgtaatcccagcactttgggaggctgaggagggtgaatcacaaggtcaggagatcgagaccatcctggctaacatggtgaaaccctgtctctactaaagataccacaaaaattagcccggcgtggtggcgggtgcctgtagtcccagctactggggaggctgaggcaggagaatggtgtgaacctggcaggcggagcttgtagtgagcccagatggtgccactgcactccagcctgggtgacagagcaagactctgtctcaaaaaaaaaaaaaagaagaagtttcatagtttttgctcttatatttggtgtacaccatgttctgagttaattttggggtatggtgtgaggtaatgatccaagatccttattaatagtattagtatttttgcatagtgtaatttctgtactatctgttgaaaatattatttcatcattaaactgactttacaccatattcaaaaatgagttaaccatagtggatgggtttatttctgatctttgttgatcttatgttaataccacactctgttgattattacagctttatcgtatgtttttaaattggctagtgtaagtcttttaactgtgtttttctttttcaaaattgccttgactattcaagtcctgtgtatcaccatataggtttaggatcagctagtcaatctctacaaaaggtactactagaattttgagaaggattgctgtgtacttattgataaatttggagataatttctatcttaacaatactgagtcttccatgatcacggaatgctttttccattcctctagatcttttaaaatttatctcaacacttcatattttttccatgtatagatcttacatttctgttgtttaatatattgcaaagtgctattttctataatgtaagtataaaactatttttcttaatttcagttttggattattactagtattagaacacatatgatttttgctatacatactgtatcctgaaatcttgctaaatggatttgttctagaagtttctttgtagatttcataggagttattttttttttttacatacaggatcatgtagtctgagactaaaaagaattttactttttcctttccaacctggataccttttattgcaatttcttatctgactgtactgtctgacatctccagtgcaatgttgaataaaagtagtgaaaacagacattgttactttgctaccaatattataggcaaagcattcaatctcttcaagctttcatgtttaaggtgagtgtttatttctttcatgctgttagtcaggatgagagagttcaatctgttcataatttgttgagattttattatgattgggtacaggttattttgtcaaatttattttattgcacacattgagataataatctgatatgtttttattctattaatatggtatattacattagttgattttggatgtcaaggcaatcttgcattggtgggataaatcccacttggtcatagtatataatcttttcatatatggctaaatgaggtttgctaatattttatggagaccatagacatactagtttgtagtttttttgtgatttctttttatttagaatcaaagtaattctgacctgttaggctgaattaggaaattgtggactgaacttggatgaatttaggaataatctcttattctttattttgtggaagttttttcttgtaggagtggtattatttaaatatttgatggaatttaccagtaaagtcagctagtcctgagcttttctctgtgacatggagtgacaaactattgctcacatgttaaagtcaagctatggcctatatttgtattactcataaactaagaataaattttatacttttaaagtgttagaagacggaagaggaggaataggagaaaaagaactgacagaggttgcatatggcccaaaatatttactatctagctccttactgaaaaattttgctgacctctgctctatatggtgttatttactaaaatacttctttacttgtaatatgtctatccagacatgtggctttttttctcgagttactcttatgtctttctaggaatatgtctgcttcacccaagttgtcaaattcattgacatagtgttgttcataacatttccatatatttctatagggttagtaattgtattcttcattttcactcctgactttgcaatttctattttcttgctttttatcttgttcagtctgactaaagtgttatcaattttatagcatttcaagtaaacagttgtagttccattgattttctctattatttttctattatctattgaattgatttttaatttgatctttttttttttttttttttttttttgagatggagtcttactctttcgcccaagctggagtgcagtggtgctatctcggcacactgcaagctccgtctcccaggttcacgccattctcttgcctcagcctcctgagtagctgggactacagccacccgccaccacgcccagctaattttttgtattttttcttttttagtagagacggggtttcaccgtgttagccaggatggtctctatctcctgacctcatgatccgcctgcctcagcctcccaaagtgctgggattacaggcacaagccactgcgcccggcctaatttgatctttgttatttcttccttatgtttacttttggttgacttttctcttatttttccagtgtcttcaggtagaagtttagattatgatggaaacttttgtagttgttttcctaatgcagttatttaaagttatacatttccctctaatcatggctgcattccatgtacattgatatatttttagttttttagttaaaagcataatttttctagaaattccttttgaagcccatgagttatttaggagtgtgatgtttaatttccaaatatttgtgatttttccagcttctttctgttgtttatttctaattaaatccctctgtgatgagagaatatactttgaattattttaatcctcctatctgtatgttattatataacatataatctatatggggaaatactctatgagcacttgaaaaagtgtacattctgctgttgctgaatagtgtgttctaaaatcatcaattaagtcaaatagtttagtagtgtttttcaggtctttttacccttatttactttctgtctagttggtgtggtcaatttttcagactggaggatttaagtcaccaactataattttggtatgtttatttttgtttcatttctgtcatttttactttatgtactttgggactctgttgttaggccccaggagttactccacaatgctgtacgggcaaatgctttctatactaaaagtaactaaacttagagatttgtgagtaccatcaagcatacccatatatgtaaaattggagtcttagaaagagagaagtgagaaaaagacaaagaaaaaataatggccacaaacttctcaaatttgttgaaaaacattaatcaaaagaatctagaagcttaacatctctcaaacacagtaaacacaaagatatctatgtctagatacattatagttaaacttcagaaagccaaaatccacaaataatgtattgaaatcaatatattttttcaacaagagaaaaatgactcatcatttgaaagagaagagcaatacaattaatctgactttaaatcagaagtcattgtttctgactttaaatcagaaacaatggagatcagaagataatggagaggcactgaaagaaaaaaattccaccaaaaattctatatccagcaaaactatcctctgtaaatgaaaatgaaataaagacattcccagataaacaaaggctacagaattgtgtggttagcagacctgtcttacaagaaatattaaaggaagtcatccagctgagagaaaatgacattgttagcaactaaaatccatagtaagaaattaaaagcaccttaaaggataaatatatgtgtgaataaatataaaaaatacatatgcacaaacacacatagaaggaatatatattttgtatattttttatatcatttgatatacatatataggttgaaactttaatcattatgaagtgtttttctgtaataatattttttgctttaaaatttatttctctgatattaatatagccactcaagcttttatggttactaatatgacatatgcttttccatactttactttcaatatatttgtgtctttaaaactaaagtgatttcccatagtcagaaaatagttggattttggtctttctattttacaacataaaatcaactcaaaataaattaaagacataagcataagacctgaaatttttaaaatactattagaaaacataggggaaaagcttcttaatactggtcttggtaaacaatttttagatattactgcaaaagcataggcaacaaaaaccaaattagacaagtgggattacatcaaactaaaaagtttctgcacaggaaaggaaaggaaaggaaaggaaataatcaacagaataaaaaggcaagctacaaaatgggagaaaatatttgcaaaccacatgtctgaaaaaggattaatatccaaaatatataagaaattcacactcattagcaagaaaacaacccaattaacatatggccaaatgacctgaatagacatttctcaagagaaagcatacaaatgaataaatgtttatcattgctaattatcagagaaatataaattaaagccacaatgagatatcacttcacaactgatacactggctaacactacaaagacaaaagataacaagcagtgataaggatgtgcagaaaagggaatcatgtacattgttggcagaaatgtgtgatggttaatattgagtgtcaacttggttggattaaggatgcaaagtattgttcctgggtgtgtctgtgatggtgttgccaaaggagattaacatttgaatcagtggactgggaaaggcagaccaccctcaatatgggtgggtacaatctaatcagctgccagcatggctagaataaaagcagacagaagaatgtggaaggactagactgtctaaatcttctggctttcatctttctcccatgctggatgcttcctgctctcaaacatcggattccaagttcttcagtttttagactcttggacttaaactagtgatttgccaggggctcttgggccttcggccacagactgaagactacactctcaacttccctacttttgatgttttgggactcagactggcttcctggctcctcggatggcagaagacctattatgggactttacctcgtgtttgtatgagtaaataccctttaataaactcctcttcatctatcctattagttctgcccctttagagaaccatgacctaatacagaatgtaaattagtacagccattttgacaaacagtatggaggttcctcagaaaattaaaaatagaactatcatataatctagcaattccagttctagatataaatccaaaggatatgaaatctgtatgttgaataaatgtatgtactcttatgttccttgaagcattattcacatagccaaaatacagaattaacctaggtttccaccaagggatgactagatgaagaatatatgatataaattctgtatatgtatatataaatatatatattatttatacgtatatgtgtatacatacacacatacacacacacacacaatggaataatactcaaccctacagaaaaaggaaatcatataatttgcaacaacatgtttggacctggagacattatgctaagtgaaataattcaggcacagaaagacaaataatgcatggtctcacttattcatggaatccaacaaagtcaaacccacagaagcagagagtagaagggtaattgccaagcactgggatggggtttcaggaagggaggcataggaaatagggaaatgttggtcaaaaggtacatgttttaatcagacagaaagaagttctagagacctaatatgcagcatgattactatagttaataatatatgtactcttgaaaattgctaagaatgtagattttaaatgttcctaccaaaaaaaagtcaaaacaaaataagtatgtgagattatgcatatgttagcttgatttaattattccacaatgtatacatatattaaaatgtcacaatatcacattgtatacaataaatatatataatttctatttgtcaattttaaataaataataaagaaatgagatagctttcaactaagcttatatagcagtataatataaaaatttttgtagtaacaaaattatagtaattttggcttatattgaaatgtgcattaaacaagtgtttgcataaaatataattcaaattactattcatagcccacagccatgaaaacatgtgtgccttactcttggtacagaaacaaatagcttttactcctaaggaaaaaagaaaattcctgccttttgatgagaattgtttgagttttatacttattttatggggaactttgctgacctcttcattccaccatagctggttattcctcccttgcatgtacttttgtttcctgggggcagtgagtcttggaaacatttgggaaattcttattctgagcttgcctgcccacagcccaggttccttcctggagtctgcagcatcaggctctctcctcggctctctttctgtcttctgtcccctcagctcataaaccccagctcgtagaagctgaagccacctagactctaagacacctgattgcagagacaggaaaggagttctcaagataagtgccaagatttcatactggttttcacaagaatcagggttggaattagagccgactcattattcagttaacattgacattgttgattagagacatatccctattgaaaatatttcctggcaaaaaatagaagttctctttggctctgaaatctgcaactccctttcaggtgtccctgtgtccttgtaccgtcactccacagcactgcacaggcatgtgctcacctcacaaaatggcagtctcaaagggaggagtgcccacccacaagaggctccaccctattctgagaaagaacttctttcagaggaggagagaatagaactttccagaaccttttacatgagatttttttttttgggtaggaagtctgacctgagcagcaaccttgcatcagacttcaaaaggcaatatttcctatacctccttgtgctctactagtgagtacagaagtcgagaaaatgttcctaagtctatggccagttcaaatagtctcattttctatttctgagattaaattatatgtattaagatccttactctgccctttcaggtttattgctcctcagacaagatatcccctcttcaggtcccaaacacattcattgcaatgcctttcctcatccttgtcccagtcctggctctctagcttcttgagacaataacccaccctaaggtatgttgtgacatgcatcttctgtgtcactgggatccctaagtggtacaagcattcactcaattgctttagctagagtccccagaatatcttcacctcttctgtcacattcttcttccacattggtccataaacacatctttaacatttctgtttattaaaacctctcaaattcaaccactattttctatcccaacgaatactgccttagctcaggcaaccactgtcttcgatctgaattacttctttgacctgaattacttcaactcctaccaaatatccacctacctgatgtcttactctcttttctaactcagttcattctctgcagctgaaaacacttcctttccattgactttagggttatgaccagtcttctttatatctaaatgttagcctataagttttttcgtaaaaaaaaaaacaaacttccaaactacaaattcttaaaaccctccatgatttggcccttgcatacctatccagtcttgtgaaattcacctactctttacccactttttgcatacttatgctctaataatattcataatccctcagctctcccaaagctccatatgtactttctcactcactcctgagcctttacacatgctgttcacactagctagaataatctttctctccctatttatctgtactcctaatccttcatgtttaaatggcataatcatcatggctgagtctctgactatgcgtggtaaataccccatggtacccagagcttctacaatcatagagtatcacacatttcattgtttaacttattatgatagtttttaaaattattaatacaaaatatgctcaatgaggccaaggaccatgtccaaggttttaatttttgtatcttcaacagtattacaggctttgaataaagtaggtgctctttaaatatttattgaacaaaccagggttttatcagttcttgcttccctagctaagatatgatctcagtcatctaaacatttctctctcagaagtattgctgcagttatttagagattttcacattgtggtagactgaataataatctcccaaaatattcagatctgaatccttgaaaatcttgaatatgttctctcacattgctgaaaggattttgcagatgtgattaagttaaggatcttgaaatggggaggttttccttgattagctgagtgggctcaatatcatcacatactttcctaaaatatcttacctaaaaccacctctgtgaagccctctttcttttcccagacagatatggaggtttctttctttatgtgtttataataaattaaacaaacttcaacttctatcactatgttatgatatttatggtcatgtctgactcttcctagactagtatggtttttgagggattggactatatattcgcttacctttgtaaatccagtatgtaggacttggtacaatatattggatacagaattataagcccgatgggagcagacacctttatttgttgttcatgcttatatcccagaatctagtactatgtctggtgcatgtagtaagagtgaggcaagaggatgcaagtcagaaaaaggctatgtgacaatggaagtagagatcggaatgacagacacactttgaagatggaggaagggccctgagcccagtagtgcagatggcacctagaagctggaaaaggcaaagaaatggattctcccataaagcctacaaaaggaacaccacctgccaacaccttgatttttagccccataagactcatttcagacatttatcctgaacaggacagaagcaaaaaaatggaatcgatcaacataaaagcagaagtgaataaggtagaaaatgttttaatgatagaactaagaaataagcaaatgagataattgtttgccagccaaaagacagagaggacaaatacactaaaacagaagtgacaaagggaagtatcatgataaaatctatttttaaaaacaatattttgtataattctctgcaaacaacctaaaagcctaaatgaaatggctcacattataaatttagcaaaactgaccctaatgtggaaaaaagcctaaacaaaacaatgactacaaaagaaataaatgaatttgtaatagaatttcctcacagaaaagtgccagtcccatatagtttcttacagggatttttccacaccttttaaaatcagggactttgagaatacctaaaacattgcaaagtatagaacagtaggggaaatttctaaattattttcatgacatgagctaaatattaaggtgcaacaaaactgcaccttaaaaaaaaaatcaatctatagactggccaggcgtggtggctcatgcctgtaatcccaacactttgggaggctgagggtgggggtggatcatgaggtcaggagatcaataccatcccggctaacacagtgaaaccctgtctctactaaaaatacaaaaaattagccggttgtggcagcacgtgcctgtagtcccagctactcgggaggctgaggcaggagaatcgcttgaacctgggaggtggaggtttcagtgagccaagatcatgccactgcactccagcctgggcaacagagcgagactccatcttaaaaaaaaaaaaaaaaaaaaaaaaaaaaaaaactatagacttacatcactgattagtattgataaaaaagtattcaataacagagaatcaaataatgacactagaaaataatctacaaattggtgtttgctccaggatggtaagggtatttcaatattagtaaacttactcttaaaatccattatattagtcaatgggtttggcctgagcactgggaaagggatgggtaggaaatactgtctcagaaaggcattgagagagaacacatcctaatcctatctggaaatttacactccccttcagccattcacgtctcttaacaatagtctccagctttactgaactctttgcaaactccaaaaataccgtattctcttagatattgcataggctggtcccccagcctaggtctaccaggaaattatttgttttcctacaaatcttacttaaacccacactacctctgtgaagtcctttcttcccacggagatatggaggtttctttccctatgtgcttacaacaatttaaagtctgttactatattatggctttttggtcatgtctgactccttctaggcaagtatggtctttgaaagatgggactgtaaatctgtttacctctgtaactgcagtagtaggactaggaatgatatatagaatacagaatcataagcccccatggaagaagagaccttctttttgttgttcatgcttgtatcccagagtctagtactatggtgcacatagatgtatatttgttcaataatatgaaagactcaaatatgcctttgtggaattgaccctgcacttatgcctcaccatctcctacttaccccggaattatttattaactatctcatgtcttaggtctcatctcccttccctagttaagagtgggccctgttgctaagcaggtcaaaataggaggctgatgaagaaaatctctgtggaaaatgctgaagaggaacacaggaataaaaatacctttactctgatgatgccttatataaggacagatgcagttggtttaaacttctacattggctcatttctatgaatgccacacctctcaatttcagggacttcccgtgaggggcttcacaacaatctctgggctcagtggggagctactcccttggtgaatctcctcactgccactcaatgagccatcagggtgggccgtcacctctgctaagccacagaggtacaccacatcctgctcctgagaggaagggaaagacagaggatcataggaagtaaaccccttgagggaaatttcaatgtggaatttattctgtttcttgagtagcatatatattttccccatctcagaccctaacctcaagtgaacttactcccagactcacacacataaatatacgcaccagcaccatcccagcaaggaggcagctgcaacaaaaagaagcaggtgggagagtattatattacatatttaactacaggatcactccaagaattacatcccctaaaattattccctccattggaagcagactagtagccaataggaagagaaattgctaaaacaaaaatgtgttcagttggatgaagtatttatttaaaacagaaatgtatttatgaagacataattcttcagaattatattataagctaaaaataaaatcctatacccaccaactgactgaaaggaccatctctgggacaagggcaccccagagtaaccttgaatgttgagttcttggccaggacaggatggagggatcagacacaccttattatacctctcctttagagccatgatgaggtttgcttccctaaaggctaaacacaaaccagccctttgaaaagactctagcactaaaagcaacagaaagtgtgatgctgtccctcctttttcctggtaaaaggccaccaaccaaacagtgtttctggccagtctatggaggacgtgtagtgaggcttttggtgtcctttgcttcaccttttgatgtcagagagctgaaaactccacccccagatcatgctaacatggccagtttttttttacaggaatcccatgaaggggcaggaaactcaattgtggatgtatatgtttttccctttattaatattcatgactcctcctatagcttattgaatatctgtatttggccattccactcagcatgtatttcttttccctttgcctctccctagatgtgtgtttctggcttctggccagaggctgtgcttcccagcctgtcagaatggccacactgcaggctgcaaccctttatgagaaataaagctctcccttccaaatttgaacctcctcattcttccattgacagtatcaaagatcagatagttgtagatgtgtggtattatttctgagggctctgttctgttccattggtctatatctctgttttggtaccagtaccatgcgttttggttactgtagccttgtagtatagtttgaagtcaggtagtgtgatgcctccagctttgttcttttggcttaggattaacttggcaatgcgggctcttttttggttccatatgaaccttaaagtagttttttcaaattctgtgaagaaagtcattggtagcttgatagggatggcattgaatctataaattaccttgggcagtatggccattttcacgatattgattcttcctatccatgagcatggaatgttcttccatttgtttgtgtcctcctttatttcattgagcagtgtttggtagttctccttgaagaggtccttcaacgtcccttgtaagttggattcctaggtattttattctctttgaagcaattgtgaatgggagttcactcatgatttggctctctgtccattattggtgtataagaatgcttgtgatttttgcacattgattatataatcattcttctaagaagataccaatgaagtttcaaggatgattcagcatgataatgaactgtttgtaatcattcaagatatactaaatgctgaaggaagtcagttagaaataagaagtaggacaaccaaaggatagaacctagaagaagacaaagaaaggattttacagaagctgctcatgaaaagagatccaccaattctgagataaaagaactgggtttgagtaagccacttgttataagcatgctcaaggttttcagaaaaaaataaacagagctagtcaatgatacctggtaataaaagatattttgaatttcaggccattgagggtagcatgctaagtgtggttttagttttgggaattagagtaaaatgaaaataatttctgaagaagtctccagccaaactttaaaaagaaaaaaatgcaaggtatagaatatttgaaaaatttattattaatagttgaaagtacatattttagaactggactgatctggtcaccgtctagttttgccatgttacttaacctctctaaaggtagtttcctagcctataaaatggaaatagtcatacctggctctgagaggttttatttagttgagaaaatgtatgtaaattgcctgacacaatccctagccaagaataagactcaataataactaatggcggtagcagtaagagtgctactactagctgaccattctgaaagttgagcctgagtgagtgataactatacactgtgcagttgtaacttcttaacacattaattcatgtaatcttcacagcaaatccacaaggttcatacttttattagtacaacttacagagagtaaaactgaagcattcacagttaacttacttgcgtaaaatgagcttaagtagcagaacccatatttaaacttaggcactctctctccagagctttctttgttagccactaaccttgtggtagtgcaatcaagtaaatgggtttgttgtctgatatgctcagaagccaataagcatggcaccagcttttgagaaaagaaaaggttttactgcaaaactggtcagcaaggagaaataagccggctcaaatctgtcttcctgattcggggtcttggacaagttttaagggactgagagcaaggatttagtgatactgggttgacagggtctgattggagggtttcagatttaaccatttatggtaaagtaggttgaggcagatttgagcccggatctttccagccaatgaaccccttgcttctgaaagagtttcagcatccagattccaagcatcttcctgtcttcttggttccgaagggaggaatcgttcgttccaggtgttatttgaggtcaaagcttttggctctgtcgtacctacaagctaactcatattttgttatccacataacagacccagtttgggctgatcctgcagttacaaatccctccctttttgtttactttagttctcaatcttgaagaaatagagtgtctaccactctagctactttttgttgacaagggacataggtctgggtttgaggaatgaaattgtttcataaataattgcaaatattcataggtcctgagttgaggtcaaacaggtgggtcagggaattcgatatttaataactatttcatgagcagggggaattgatttaacaatcaatttaaaaaatagacagcaggtagagaccttgagagaaggaagagaaatcttaacacatacagaaatataattttgagtttaagtagaccctcaaaaaatagatcttattcctaatgaaaacacgctgtttacatattatatccaggttttttagagaacactagatggcgtcgagtggcttttggtctattatttgggtgggtctcaacttttttagaagtattaatgtaaacacagcatgacatattaaagcataaacacctctttgtttagccagtatataatctagagtaattttattatctattattactttagccaaagcacctggctctctctattgagccaccatggccattgtggtctccttggcaagctttttcagggcaatggaaaggtttttaatcatatgtttataagaagcaactccccaccatggcaacagagtttgtctaaagaaatatcctacaccatctggtgggccacctggtaaatatttaactgggaggaggtttagcatagatcttttggccaaggtgaacagttttatggtgttagtctaatgcccagcatcactaatgccacagacagagaaaggagtgactaagtaccctagtaaacagatgtctttggggcatcagctgtcaaggcattcatagtccgagggctggtcgtttgtttcatagacaaagacatatcctgaggaggcgcatagaataccagatatgttgccgggcgcggtggctcatgcctgtaatcccagcattttgggaggccgaggcgggcagattatgaggtcaggggattgggaccatcctggccaacacggtgaaaccccatctccactaaaaatacaaagaattaaccaggcatggtggcggacacctgtagtcctagccactcgggaggctcaggcaggagaatggcgtgaacccgggaggtggagcttgcagtaagctgagatcgcgccactgcactccagcctggatgacagagcaagactccatctcaaaaaaaaaaaaaaaaaaaaaaaaaaaaaaaaaataccagatatgttaacatctaagttctcagtttcaggaattttacttaggacttggtcaaagtaggagtcagagtatagaggagtctagaaggagttatctaacttacaaattggtagggaagagggcagtccttgaaggcatactaggttctttttatttaactcttgatgtaatcatgtagatctacagtttgaggacacatcagtgtatatctcctggaccagaggatagaaaacaggaagtggaaaataggtgtgttaagtaaagagatgattttcgtttctgcgttagccagtgtctggcttctgtgggcatgggcccctttatcctcagttttaaagctgttaacataagtgtctttgcaggggatgttaatggaaaacagggaactaatgatcctcccccagcaaatctgaccctacaggttatacctgtgggttttttatcataggtcaccagaatattaggcactttagagaagttggtcacagagataagcagcagatcagtgtgatcaagtgcagaggagggtttttgatgacatctctaacatttagatagattttgtgaggtaggtagggattgggacatttttatcaagaaattatctttttggccagtcatggtggctcatgcctgtaatcccagcactttgggaggctgaggtgggtggatcacttgaggtcaggagtttgagaccagcctggccaacatggtaaaaccctgtctctactaaaaatacaaaatttagccagatgtgttcacttgaactcaggaggcagaggctgcagtgagcgagatcatgccactgcattgcagcatgcacgacagagtgagactctgtctgaaaaagaaaaaaaaaaaagaaggaaagaaattatccttttatgttgaggtaaggcaagcaaaaggatataatagaggaaaattgtgggcatttttaacagaggaaatcattttgtttccctgagaggagatatttggctgatagaaaaaaaagcatcagaaaaaaataaactctacccaaggaagggctataaggtcccaaataatatttttgaggttaaatcaaggaggtagagatgattaattcaatagcatagaatagtatatatgacaacaaggcaaaaattaagttgcattaatacaggcctcgcccaatatcttgggcaagctgtctcctttaattgtctcctgtttctgccctcacagttccatcagatggaggctggttttagagacagaaatggatttccacttatctggagagctaggagccctttggccttattgggttttttaaaaagtaacttaaaaaaagattaggggcttccaagtgagttcctgggtggaaaagctggttgtgggcctccacagccatctggtagacggtcagtctggtcctttggcttttcttatctgtgaagggcatgacctgtttgggaattttacaggggccaagaggaatcttctgaaaatgggaataacttttacccatgaatgatgaatttagggcctcaacacttttaactttattgctgaatggatcactaaaggaacttcataaggacctaatctgtttgaactgtagttggtcttcagggtagcggtttttctaggtcttaagttgtacttagtttcctagacttagacaatgtaaaggaacatctataggaaacattaaaacagctagaagcgtaattatgtatagcagaaaaagttatacccagagactgtacacattttatagcatctaatgcatttacccatcatgatcattttcaatattaaaacagtatttagtcttaagaagggttgtcccacatagaattttgtaggggctaaactggtgcttacttttaggggtcattcttactctaagcagggcaagtggcaagatcttatcctatgttaaattgggtttttgacacattttggcaagtactttttttaagatattgtttatcttttcagtctttctaatagactggagcctctaagaggtgcttaatttccactgtatcctaagagctccataaatgtcttaggtaagtctgatatctctgttgtcactttgaattgaaaatgacaatccaaaggaattatgtcttttaataaagcttgagttacctcagatgcattttttgtttgacatggaaagaccttgacccatctagtgaaggtgtctataagtaccgacaggtatttatagtttcctccagctcctggcataactacaaagtctatttgacaatcttgtcttgtttctgttcctcaggtttagacccctttgcctgctggaggtggttctgtctttggattctctgtagcacaaataagacaattttgggcagccttctggatagtcttttgtacgtgcagcctgacaacaaactttggtaactaatgataggttgtgtttcttctataatgagttctttgatgtaactgggaaataatcctttatccagtgctcagggacaagaactattccttgctcattgtaaacctaggcttcttgttttacactgttccctatccaaatcttgagtataagtatgaaatccctactggtttgctctttctagatttacctttgagtactgggtttaaataaggacagattcatacttggaataagtaccagagcctttgttttaggctctcttgtcctggctgtatgtttttctgcctgattggctagattattgcatttagttatctagctatcagtctcttggtgtcctgggccgtgcattatggccattttttttgacatcaaaattgagtctaataagtctaatatctctcttgtgtgtttaattttattttttatgagattaatgagtctgtcttttatatggtcccatttgcgtgcactaccaaaaagacgtatttggagtctatataaatggttaccttttcatttgtcctgaggtgtgaagcttgtgtgacggcaataagttctgccttttgggcagagagaactgatgggaaagcctcagcttttaacattctctggtaagtcactactgcatatctggcttttcagagaccctgatccatgaagctgttcacactggtaaacattcccaggcctgggtatttcaaaaactgatttgtcaagccagacctgtttttgtagatcctctttagggatttcaggcaatggtccttcttctacctgtaataaggcaacttggagggtgcagtcttgtttaggagacaccttaatatttactcattctggtgaaaaattactgtgcatttaattttgttagcaagtcttatcccaacaaaggtattgaacattcaggcatatataggaagctatgtttaaataggtttaataggcttttcctctatggcatttgagtggctgaaagaaaggtttgcaaggatgtttccccagatgcaccagtaatagcagtgttctttgggaagacagggacttgtgttgtgtttgggatagagtatgtagctccatggtcaactagaaaatctatgcatcacttttgcacaccaattgtcatctgcacttcttggtgggaaatgtttacagagctaatagagtgtatagaagtccctgggtctcatcattactggttgctatgagtaagctgtggcatgtggtatgttgatttgtggggagttttatcttaaaagactatagacaagtatgttattaaagtttcccattttgtatagagttttacctgaaatgactggaataagatcctgtaaaaaggaggtgttctggttctgtggtattgtgattatggggattcctcttcagagaatcaccaatgggctagatattccctcttatgtgtctcagagggtcctaaacaccagatggtattgggccgcttgagatgttggggttaccaaggccccttgtatgctcctcctggatgagctattgaagttctaacccaggaatggggtatgtttttctggtggggttgcctataaaatcactttacatcataagccaattgcctcaacacctctgccagactcttagtcacttaggaataccctaaaagggcaggagaaagcaatgtatttcatctttggaatccaaggactttcatttaaataaacttctaatgaggttcttgtcacaaccatcaaaaattttaacctctgttaggatgaataattatgcaaaccaaaaactcagaaacacaaaggaaaaccaaaaccaagccgaattgaatactcaaaaagttacagcaccttactattgtacttatttttttggatgctaacccaaagccaggactgaaataatctaaccaggacctccctagggtaggattcaaaccgatgaagctgcacaaaaataggactctaatctacagtcctagaccaaagacaatttaaggtgtaagcacatattaacaaggtattgactccaaaagacatcttatccagaagaatttctttcctcaaaagagaaagtagcactcaaagggcctgaaatgtcatgacagagaataaggacctcacagctaagcctctggataaactggtctaagtagcaccactcagggtcagtgaagaaactttaattcccactgaggggctacagtgccttggcaggtgttggcctcacattgggcacctatatttgttatcaaacaaatgggtttgcacacagaagccaataactatggcaccagcttttgagaaaagaaaaggctttattgaaacaccagtcagcaaaaagaaaggagtgggttcaaatctgtttccatgatttggggtctagggcaggttttaagggatcagagagcaagggaaaggatttaggaatgttgatatggtagggtctgattagaaggcttcaaatatgactatctatggtaagatatgttaagaaacattttagcccgggatcttctgggccagtggaccgctcactactgaaagaggtctggctttcaggttccagtcatgtcttggtcttcctgtttctaaggggaggaatcttcggttctgggtattgttagaggtcaaagcttttactactgcacatgcctgggctacatgatttgcagttatgtagctgttggcagtgtgggagatgagtgttgtttctctggccaggaaataaatgaaaagtgctggttatcagggactaaattcatcacagcaccaagcaacatcctgcttttggtgctgccatgagcaacaggcttctctgctgtgtgatcatttgtctcctaagagcaggtgagtcctgggcacaggtaaggaatccctattactgaattcacaggatctaactataaaatgtttcttcataaaactcacattagtctcctctttcccaggccctgtctctatttgatcatccatttttccccccaacaggcctcaaggatgctgtagttacacaattcccaagacacagaatcattgggacaggaaaggaattcattctacagtgttcccagaatatgaatcatgttacaatgtactggtatcgacaggacccaggacttggactgaagctggtctattattcacctggcactgggagcactgaaaaaggagatatctctgaggggtatcatgtttcttgaaatactatagcatcttttcccctgaccctgaagtctgccagcaccaaccagacatctgtgtatctctatgccagcagttcatccatagcactgcatagccatatcctctccacacaaaaaaaggtgcataccaaagaggaaaagcctgccctcaaaattcctcaccccgaataagagaagtttcctcacaagtattgacaaaaagagccaaactctgtaaaatatttgaagagatttattctgagccaaacatgagtgagtgtggccagaggcagaggctcaagagggcgtaagaacatgtgtccaaggtgctcaggctacagcttggttttttggagacatcagacatcagtcaatacatgtaagctgtacattgtttcaatttggaaaggtgggacaactcaaagagggggcttccaggtcataggtggattcagagatttttcaggctggcagttggttgaaagagttaagttatcatctaaagatttgaaatcaatataaaggagtgtctgagttgtggggacaaaggttcttattatgcagatgaagcctccagggagcaggcttcagagagaagagattgtgtttcttaatcagacttttaaaaggtgccagactcataattctctcctggatcaggggaaaaaacctgaaaaggaaagaattatctacagaatgcagattttcctcatgatagacagctttgtagggccatttaaaaatatgtcaaaaaatatactttggggtaaaatattttgatttttttcagggcctgctgtgagtcatgttggtgtcttattgctacaaaaggtctgttttgtcacttgtaaggtctccattctaatgttaatgctggttggttgtgcctgaattctaaagtgaagagggtataatgaggcatgtctgaccccacttcccactaagacctgaactggtttttcaggttaactttggaatgctcttggccaagagaaggggtccacacagttggttgtggggcttgggattttatttttggtttacacaagattataccaaagcccttccctaaatttgatatgccctgcttccctctttccatttttgtccttctaggacatctttttggttgttattaaacccttagtttcttgtcaatatcccactagactacagggcatcaacatgatatgaacacttatcttggtttatttgtgatactatagcaaaatgactgagattggataatttgtaaacataaatttgtcacaattctgtaggctcggaagcccaagaacaaagcacctcagttcaatgtctggtgagggccttggtctctgcttccaagacggcaccttgagtactatgtcatcacacgagaaaagtgcctaagctagttccccagcccttttatgagtcactaattcattcatgagagcagaaccctcatgacctaatcacttctcacctcttaatactgccacaatggggattacatttcaaaatgaattttagaagaaacacattcaaaccacagcacatttctagacaaactttcagacacagatatagggaaattttaatgaaattgaattttaccaagtaaagacaaataacccagatttgcaaatacccttcaaagattcttcaaagcgatctcaatggttaatcgtgttgtttaggaaaataagaacagtggcagcaagacctcctcagtggtacaatggcctcagcagcagtaaaagagggtagtaaacattatgcagactttgtgtgggctcaggatcacccacagagaagaaggttatttgcatgtatgtgtgtaactgtgtgtgtttaagagaaatgaactatgtttatttacagggattattgaggagcagaacctcagttgggtagatgcaggtataacttttaagatcaatatccatgtctttgaatagataggctagagatacagatttactgagtagttccccaaagatgcatgttgggtgataaccacctatactagttttccaattactgcaaattcagcaggttaaagtaacaattgtcttatctcatagtcctgtatgtctgaagtccaagaaaagtggctggatttttctcagggtctcataaggcggaaatcaaggggtcagctgtctgcattctcatcaggagactggctcctcctcccagatgattcctagtattggtagaatttggttccttgtgacagcaggtctagggtcttcattttttattggctgtcacagacagcaatgagattggtcattagctccttgcagtttctttctggtcctcttgatcttcaaatgcacatcaaatctgtctcatgtttaaaatccctctgatacccacttctgcttcaagacagaaaactctgcatttaaagggctctggtgattagattaggccaacctgaatagtatttattttgtcaaataatgtaacataatcgctggggtgacatctcatttttaggttccactcatgctcaaagtgaaggacattatacatgggcatgagtcattggaggtcattcttggaattctgcctatcatatcaatggaggtcaaatgccaggaaagtcaagaatagaaattcagagagcatacaatcaaatacattaaattagaattcaaaactattcaagagatggttcagagttttggccatgcagtgcatcaaattttcttactactgcttaatcaaggacatagtgcagaagtagaatgaattggtctttattaaaatggaacaaagaccaggtcgaggaaggaaaggcaaaaaggtagaatagatttggctcttactggaagaacactggagattcaagacgagaaacaggattgttttagtccctgagttaacaaaagagaagaaagatgaaaccagaacagttgccaatgaaggagcagtgaagtggaaaggcagaatggagtgagtgtggagagcacttttctgaagagaataaacttagttatcagatgaaaagagatatataattagctttgtccttataaattttgaggtaacttactatggaaatactttttcttatcagttaattaatttggggggaggtagcacaatcctttgaaattccaataagtagaaaactacttattggaatttcaatgacctcaagatgaagccttgaaaaagaaatgtctgttagaatccagttaacaggagaacacctactgtgactattatcagcaagttggtgaaaacttcctgaagaagaaatgtgggatgatacagaaactaactaaagtctcggaacagcaaatagtttctcctcttgtgaattaattcaccttccacaattaagcagagataactcagggtacctcaaatacttatgagcttcacagaaatgaattgctaccaaattccattgatggaggaagataagaaaatgatcaaagaaaatgtaccttcagagaagaagaattgttgagaaggtagcagtcctttctcctttctctttccatgaggtagttgctattcattactttatgatggggactgggaacacaagaatcaccactcatggattaatgaattcaagatctatactttccattttgattccaaatttgaacttaaatttattcaggacaccaactgaacacttctacctaaaggtaaaactcatatcatatttccctcccaagatgcatttcctctgagttcctgacttgacagagtcatttgtttgtacaatatatgaacactgagagtcatgccacatttctttctcttttgccctggacatccaatttttatgcaagcactttcatttctaattcctaaatatcttagttctttgtttgctatctcaatcactgcaaccactgacatgtttatgcccattttactagcttaccaaataaatataaaaggtctcattaatctctctagttccttattaatcctcatttcatctaatctagtattattagtatacccaagtataatcttccaaattgcaaagatctgtttctatcactctttctgcagcatccttcagtggctcccccatggtctacaatatatacaatctaagtttattaaaatgaaaaaaattatgactatccctttaatattttgaaaaaaggaaaattagtcctttaccagaaaaaaatagcactgtattataatgtcaagttcacactagagtctaggatggtatcaaagagctctatatttttcttcttgagtcactttgatatcctcccacagtaagaccactatagttggtgtattagtctgttctcacactgctatgaagaaatacccaagactgtgtaatttataaagcaaagagggttaattgattcacagttccacattgctggggaggcatcagaaaacttacaatcatggtggagggcaaaagaagcagacaccttcttcacagggtggcaggatggagtgagtgccagcaggggaaatgccagatgcttataaaaccttcagatctcgtgagactcactcattatcatgagaacagcatggaggaaactggtcccacgatttaattacctacacctggtgccacacttgacacctgtggattatggagattataattcaaggtaaaatttagatggggacacagagccaaaccatatcagttgggtactgaggaggacatactgtattaatcatgccttcttattgtctgtattttctaatgttttgacatccatattttctgatgttttgacatctgaggacttgctgatcttggagggactgaccctctcagtgttaactcattcctagggatagcaaactactttccctagagcatgcctttcataccaaatcaaccaatccaaagcctctactccaaaccacctcctttattgggctctcatactctaagcccctattctcctaccctaattaccacagggccaggtactaaacaacttgagataatccctacactttggagcctgctcaaatttttaaactagcccatgctaagcctacttagcctgtgtaccctgcctccctcattcgttcagtgaaaaccacaataaaggttcttgccaatgtttcctgtcactccttctatcttctgacccactgttgtgattcttattgctatgatattttttctaacttggtcttgaggtctctctttttagactagccataaaccaatatagccattctctaggagacctctgactcaggggagggggagttaaattcaggtgtgagtgtcaggtgagacacagtggagcaagtgaaaacaaaatgcatgaaaggaagaaatttattactcacagaacccaaagaggttagagaggcctaagagaagtgtgaagatggcaggagctcatccagtttgggagggaagggagggtacaggcaaaggcaggaggagggggtgggcgaggccagtggaactattccttaggctttcctatgggggttatgagtcagctactttaaagaaaacgtttcagaaggagaaaacttacttgcaggactctagcattggccattaggctttatcatggtcagcagctctggagtgtgctgggttttgggtcaggggaatgagaaatagaccatatagccgacaaccacatagggagaagttttaactggggcaacgacgacagggtatgactgggtttcaaataatttgtttcaggccttaaaaaaaattggggccaggcacagtggctcacatctgtaatcctagcactttaggaggctgaggcaggtggatcagtttgaggtcaggagttctagaccagcctgatcaacgtggcaaaaccccatctctactaaaaatacaaaaatcagctaggcatggtggtgcacacctgtaatcccagctacctgggaagccaaggcaggacaatcacttgaacctgggaggcagaggttgcagtgacccaagatcatgccactacactccagcctgggtgacagagcaagactccatctcaagaaaaacaaacaaacaaacaaaaaactgggcctgtattgccctgcatagtgtgtcatgcccctttcttcttgggaatcgtaggtaacaaactgtattttcagtggcagctgtctcctcatccattagctctaccatacttgaataataatagcactcatattctaaaacacttgcttcttatgagtaggaagaatgggtcactgcttcagaatcccagacatgtccaggaggaggtgaaaaccaaatgagcagatcatacccagcctgattgaaacacacacaatatagtcagccctttgtctctatgtattcaccaactcttcaagtacacctatgtatagcatgctgacaaactctgtcttcttcaatctgctaaatcattttccactttcctacattgctgtgggccaggagagccctgggtgtagtggaaagtggggagtgattaaatccatctaggaaggagatgggtgggtgaaaaaaagtgtgtaacatatacaaaggtttctatgattacaagcctactatgaaatccagtcacacctaccactcacagtcccacttactttgctctaagccacactgaactctatctccaaacatgctgtgcataatatttcccttacacagcacacctgcaaattcctttcaaatataacttaaaacaatagcactacatgaaatgtgccattttcccaagaagattgtagactctttcccctgtattctccatagcttacacaattctccctttctacaaataccaaattatcatgtttattggtatagtgatcttaccatgggcctacaaaatccatgtggtcaaatgccacgcctttccattattccttccccagaatcttctcctatgcatgacatccatgtttaatgaatgatcagacacaattaatatgggaacagggatgctgacttctgtgtttatgcctctattctcagggtctgaaacagcacctgatatttaacaggtgttcattatgtggctgttaaaaaaaaaaaatcagcaatgtctacaatgatttgatcctgggtttgcctcttctctccttcttcctccaaagtatatttcttaaatttaacaacccttgccttccttttctgtctaagggctactggtaggtaggataatgactccgaaaggtgtctatgtcctaaacctcagaacctgtaaatatgttaccatacataataaaagataattaagtttgtagatagtttagtgtgctaattagctaaccttgaggcagggagattatcctgactcatgcaggtgggctcagtataaacacataggtacataaaagtgtatggactatggtgagagtgatgtgacaactttacctgctgttgctgctgaagataatgaaaggggccacaagtcaaggaatgtgggaggcctctagaagctagaagagaaaaaagaaaacattctctcctagagcctccaaagagcaaactgccaatgagaccgaccctggacttccaaccaaaagaactgtaagataataagtttgcgttgttttaagccactaatttgcagtaataggatacagcagtaagagaaaactattataaggctctatttccaagcagctgaaaaaaggcagctgatgaaagaagttgtgccgggaagtagcctaagaggcaaaagtacaaaggcaggagtttgaatcagacgatgccacttttaagggtggatttgtcagagacatgtgaaccacagcaactccatcttaaataggagctgggtaaaataaggttgacacctactgggctgcattcccagatggtgaaggcattctaagtcacaggatgagataggaggtcagcacaagatacgggtcgtaaagaccctgctgatgaaacaggctgtagtaaagacgctggccaaaacccaccgaaaccaaaatagtcccaagagtgacctctggtcgtcctccctgctacactcccaccagtgctatgacacaaatgccatgacatcaggaagttaccctgtatgttctaaaaaggggaagcatgaataatccatcccttgtttagcatataaaaggatataaccataaaaataggccacaagcagccctcagggctactctatctatagagaagctattcttttattcctttattttcctaataaacttgctttcactttatgctatggactccccctgaattctttcttgcttgagattcaagaatcctctcttggggtctggataaggagcctttcctgtaacagctttctggtgatgatgaagggactgtagtgaggaaaccctggaaagaaaggataactttgggtaagtgttggggtcctgtaacatcttcctggcaaaccctgaagggatgatactaagacgacctccccccaacccaaggaaatagactgcagcaccgattggacaactttgggtaagtggtggagtacctacccaggtaaagaatgggattgggatagaggctcaacttaggggagttagagtctctcctaagacagagagggttaaaggcccctcttaataaaaggcaaggacacttgaatgaccttgggttagaggcccgatttaggaggattagaatccctttccaagatttagggggttagtggcccttcttagaaagtctgtcttggtaaagtcctttcgggctaagaacgggttttgcactacaggatgttaactgctattctctttggattaatctgccttcaactccttgctgacagctgtgtgtaacaggattaggcatgtacaggatcatgggacatggggaactattttctccctaaaacagaaaacttgagagctgatgggactgctggaaaagatccttcacaaccatcatgcggccacctgaaccgttcagtgtcactgcaatgggtgggtctttctctggtgtctccgagtgcctccccttccccaccctgcctcaggcagtgctttcttctttctctgtttctctgtctctctctttttctccttgcaaactggttgaattaatggtaaaagtaactgtctcctataaagttttgattaatggaagaaagggtttttgaggctagacttaagctgtagcaaatctgatgtgctttgtgtgtttttctgtattattctgtcataaagaggggtaccttatgatagaacactggctgaggacacttgtaaactgcttttcaagacagaccagcaaactggtcagttacaaactttgctgtaggttcctgagaaaaattggatgagatttttttttgtcttgcatgtccttgggagcttgaagctgtaaccatgtggccatgttttcgcttttcacaatggcatcctgtgttcagggttctattcctgcctcaggggatgagtttttttatattcctatgtgtatgtatttacatgtattatgtgtatgtgatgtttatttctaaaagagcattgattaatgggtttaatgagagcttaaatcaaatattttgtcagaaaagtaaaaagtgtagtgccttttagttcacgtgactttaattttccagaaataaggacagttttgaagattattgataaaataaaaatatcttcaaaaatgtaaacatttggcttaaattaggcaggacacatattaagactgctaaatgcttgaaggtcataaactgcttctttaacttttgaaaaatttttaattaacctaccttgaagccattagattctagataagacctggggacatgtggagttagccacgccccctagctatgctggagtcagcctttatctgcacttctgcctggtgtgtccaaggctaggctccacacctagtacataattaaaatcctgaatttagcaacttttcgtgaaaaaccttggtaagagtcaacattataacatgtaattgatactactgaagaaacagttttatatgcaaattgtgtaaagaaagtgaaatgcatttttcattaaaattatatatatatatatatatatatatatatatatatataaagtcatgggaatttagatttttgcctagattaaagcattaaaggatcgtttcaagttaggatgaagctgactgttcaagaaagctgtggaaggcttatgaaaaaaataaccataaaagagattctgtgtgcgaacattggctaaaattaaaggggtgttattcagttattctagaaactgaacattggaataaaagcactattctactctttaacaaaaacttgtaaagggttataaaaggtttataaaaaccttaccttatggtcaacatgattaagattgaatacatttgtctataaggttttactaagaattgggtttgacatcaataatgcatgaatacagcagtgacatttggcttatttaatattacagtcatacaagaagcattatcaaatacaaaatggcatttggtttttttgggctgtatttgtataaatgtgtcattggtacatgttccaaaattattttaaaaaaaacttctttaaccctgatatgacttagtgtatgctattaataattgttaattaaaatcattgcatgccacagagtcaaccacatttttctagtcaattttggctttaattgtggctgttctaagacttttggtcatccagacaattgtctcatattagttctctgtaaaaggtggtttagaattaaatgtaggactctagaaaactgtgcttttaaatgcagattttctgataaatttggacattgtgacatcagaacagaggaaaacctttcaggactcagggagagctgaaatgttcatgaatatcaagcagaacagaagttaactgcatggactaaactagcaaaagtctaacgtgtaaaatgttttctccctaaaacagaaaacttgagagctgatgggaccgctggaaaagatccttcacaaccatcacgtggccacctgaactgttcagtgtcactgcaacgggtgggtctttctctgttgtctccgagtgcctcctcttccccaccctgcctcaggcaatgctttcctctttaactttttgtgtaaaatgttgctgatcttttgttttgtgtttcagagtcaaggaaacttttgagctattacagcttttagcaattgagtaaagtatacatgtgtgaacaaaattgagagcatatttttttctctttacttgatttctccagattttggaaactcattgtgaatagtctcaatttatggcaatatagttatttgcatgagtgtaataagaatctgttgggtttttgttttgttttgttttattattattattattattattatttttgataacaagacacaattggagaaactggttattttaccaagactttgatggaatggtatactctaaggaatcaaacttgacttgccaagtcaataaaagccccttggggaactggcctcagacctttgatacaacagtccatgtacatgatttctgacctgtggtaagtaaacaatgtcaccttctaacaggtccaggagccccaagttatcttgggaccccaagaggagaggaatttactcagctcataggtatttgaggatacaaacccatggtagggcgcggcttaaaaagagtcttatccaagattccttctaagaaacaaagttccatcaaaaccagtgttaaaagtctatgtgaaaaataattattcttgctgtactttatataaataatcaggccaagtataataaaacaaattggtcttaccatgacttatctttagtgaaaatggaaaacaggagaaagaatattacgtttcaagacctatgttacacttggtattaaattctagtctcatcagttgttgtttgtttatgcagtttaggctaaccctgcttattcctatgaaccaaccagtgatctttgcctgctactctgaaaaaacaaggcattttggtaatgtaaaaatctggatttcattctaattctgggcatgtactggaattgcctagccacctcatgtcagcttggttccagtagttgcccagttcatgaagagccttctaatttagtttacttgggatacttttgcttattttgttatattgctgttttactctttgtgtaggaatgcagactaagcttactaaatgttttcttaaaccgaatacttattaatctttcagatatcacctttcgtcaggactcaagagttctgaatggccttcatcatactgaagctttctgactgagctcctctttaccctgaacacaagagaccataatagtcaggcagaaatatcattgcccctattcagcctgaagaagttacagaagatgaatctttgtccttctacaaccttaggattaagggttcttttataaaagggaaggaggaaatgtctaagacatatgaactagagcaacttcatcctgaataggagctgagtaaaataaggctgaaacctactgggctgcatcctcagacagttaaggcattctaagtcacaggatgagataagaggtcagcacaagatacaggtccttaaaaccttgctgataaaacaggttgcagaaagaagccggctaaaacccaccaaaaccaatatggccatgggagtgactgctggtcgtcctcactgctacactcccaccagcaccataatagtttacaaatgccatagtaacatcaggatataaccccatatggcctaaaaaggggaggcttaaataatgcaccccttgcttagcatataatcaagaaataaccataaaaataggcaaccagcagccctcagggctgctctgtctttggagtagccattctcttattcctctttcttaataaacttgctttcactttactcagactccccatgaattctttcttgcacaagatccaagaaccctctcttgaagtctgattgggactttttcttgtgacagattctgccagtttctgttcttggcaggttccatttctacaaattcctcatctctacaggtttaggatcagaatgttccagcagggagcactacagctgtttcaatcttcagggagactactcatcttgggaataattccttcctttgtcctgtcagcataatgtgtatggaccctgctaagcagcacccagtcatgaaagtgctgccaccgaggaaggtaaggaggttatgacaaaaaacacagaacgtgaccctttgaacagcaggagagtagaaaccgttcttgtcatcagaaatttcagagaggaagctcactcactgtccagcttccctcccacacaatggaagcataaaaatggaaacccattttgcacaagaaattagcacgttgcccctcaagagaattatatcctatgtttgtttctgtaggagtgtctaaacagttaaaaccatgtaccattcacaaaaatctatacataaaacatgaatgtttagaaagtgaacacatatagaatgatatttgtttcaatttaagatgccaacctggatacaagtacacattcagtttgactaaaattgctgtaataataatctaaaagcaaaactaaagaagggtagaaaaaggaaggtaacagattcctgccattgataatggaaatcatagcatgtaaacaaagccaatcctgcttgggaagttcaccctgagcctgcaaggaatgtggggaggcagcatggggcgcctggatgttacaggtagttagttaggcatgagtggggcaggagagggctcccttccccccaccgcccagaatgtcagacaatctggtattgattcagagattataacgttgcctctctaataataatgcataattcagcagcctgagatagggaggtacaatctcttgctgatccacagctgttaacattaaagtgtcaattgaatgcaggcaccaaggagaagcaaagaaggtttccaataaaatctcaggtattgggcaggtgaacccaggtatgtgcattgagagacaaaagggtggagtacgaccttccagggacactccaacagaaacaggaagaaagcgtcagatgggcatgcatacaacttcctaaacacactgcgcatgctcacttccgaagtgtaaggagggcactgtgcattcgggcagcctatcctaaggggagaataatgagaaaggggcacaagatggccgcctatgaagtcccaggatcaaggttaaatgccgcacttgttcttcaagtcacctgcttggatctcttccaagtgttctttcttttcttccctgttctaaagcctttttaataagcttctactcctgctctaaaacttgtcttggtctctttttctgctctatgaccctcagtggaattttcttctgaggaggcaagaactgaggttgctgcagaccagcaaggattcactgctgataactcaagataccttccaccagtaacttggagatgacaccaagagacaacacaggcaaaggaaagtgtattaattctgttttaggtgtagaaactggagtgattggaaaataattcctaaaagaaattgaaaagtcaaattgtcaagcagtaagttcaccatcacatttaccataaagcatgtagagaaatggaaatatttacacatcatagttgagagtgcaggatttgcagtcagacagtttctggcacttagtagctttagaaagtgacttaagccctctaagccctcagttttcacatctataaaatgaagtaaataatataagcctctcagaagtggggtgagggttgaatgaaacaatatgtgagtagtttaacacagagactggcactgacttaagaaagtattgtgataaaagcagcagtggagaaaatattttgaatagctgtatgcatggcaatcctttaacctctttattcatggcaactcatttaattgccacaacaaatatgtaagtacttttattatttccattgttatggactgagttgtgctaccttcttcatttcatatgttgatgtcctaagtcccagtgccccataatgtgactgactatatttggagatggggtctttacatcgataattaagttaaaattaggtcattagggtgggccctaattcaatatgactggtgtccttatcaggaggttaggacacagacatgcaaagagggaagaccagaaagaaggtatagaaaaaaaaaaattgttatctacaagccaaggagagaggcctcagaagaaaccaactcaacaaattttaaaagatgtattttggagaacaaaactgttagaatatatttagaacagaaaaaaaccatttcttctagaactaagttggtctaaaagtgcatatcttggtaaggctctgtgaggaaatgacctaatctggagagaagctgctgggacactcgtctgtgtgtggcctgtggctcacaggggcaggtattctcagaacgcacatgggataatcaccatcctggtgtgtccaggctctgggaacaggctcttcctcgtggctttcacatgagtttcctggtgggctatgtagtcacttttctgcatccttcttttaaaggctcatgaatgtcaaagtaacacagaccctgagatgaggcaggaaagttgtatcggaatgttttcagactatcaaccagaccaaacgttctggaatccataagatccagggctggggataaatttaatctattaattattcttctgaagttggcagctttgaaaaagatgccctgagtcagcatagtcattctaaccaaaaagaaaaaagggaaaaaataatcatctttcccaacccttaaatcgtccagcactaaccagactctgagaccctctgcagcagcagcctatcagtgcagccacatcctctctgagcggatatgacaaaccccagggttgaagcgacctaacctatgagccgccacacacactcaagatgccccagacaccctgcactccgatcttactcgttcctttactgttttcatcctaattgccctcttacacatttgaccacacatttttggtcttggtggttgtattagttttctgttgctactatacaaattgccacccatttagtggcttaaaacaatgcaaatgtatcaccttacagttccgtagttcagaaaccaacataggtatcacccagccaaaatcaaggtgtcggcagatctgggttcctttctgaaggctccaggggagaatcgattttcttaccttatgggttgttttcctctatcttcaaaggcagcacgttctgttgctctgaccctacttgcatactcacagctccctctaaacactgccgggaaaggctctccacgtttaaggacctgcgtgattacattggacccacctgggtaatccacgaactgcttcctatctcaaggtcggctgattagcagccctaattgcacctgcagctttaattcccatttgccatctaactgaacatccacagctgttacgggttgcagggattattagcacctggacatctttaaggaaccattcagccctccactccgatgttccactagagggcactaacatattcctgtaatataaacattaaaattcagataatggtgggagggaaagtttgataaaattgaatactgtattatcaattttaaaaacttgatatataaatatgtctcattggggtctttcaaaagctaatcatatagtacaagaaaatacataaactggagtgactctcagaactaaaatggcctgagcgtaagtgaaatagaatttgaagtgaggtgagaattctgcagtctattcctgggctcaaaatcacatagaaaaaaacaaaaaaaggttgctttatatttaaagggacaaggcataggttctcttacaggggtttttaggaaatggttcatcagtttagtaggtgttagcttaattgcttttatcgggatactgttgccccggttgggtggatgagcagtccctaaaaagagaaggaagagagcaaagaccgaaaaagtatgaaggagaggaagggatggcatggcgtagaatgaaatgctttttcatcaaaatgcaaagatgaaggagatgtttcagagtgcccggccgtctagagggttctgtttactttccattcccgctgttagggacataggagtctgccctacattagggaaatggaatagaataagtttctagaattcctaaatatggtggaattgggtagaaaagatcagagggaaggttgtaggaaggaagggtgggaaagtaaaacaactggctcctactgtaaggctattggagcctcaggctaacagcatcattttagtaccttggttgaggtagaaaaggaaacgagagcagaatagcctcatagtcaaaggaacacagaaggagaaaccacattgctgaggagagtgaattagctagtagagggacagaatatagaattagctacctcctaaatcttgaattaatctaatatgaaaagacattgggaaaaattataatactctgaagtgtaattatgtacctgttcaactttgaaacaccacggaatgttgggaaatccaatatccactaatagtgagctatgtggacgcgagtaaattctgaaagattttgctatttgggatgtcaaggtttactaagtaacatgaaattatttacttgcagtgggtttttagaatgaaagttgttttccctctcttaagaatacccgaattcacagctaggatatggaggatttgccaggaaaatgcaaacacctgtggctgaagtagagccaagctctctccctacatttttttccagaaagcagtggtgaagaaatagaaaaagagagaatactcctcttagatcagagctaaggtcctgatagcaatcactcctttctcaatgcatggaatggaaactgttagagctgcacctctcaccatgaaggggtctgggggcaaggaactcatctctgaggtttgagagtaggcctgaaaaccgggaagggggccccttcttgtctggagatgataatgatttggcaaaaacaatgacgggctctgtgaggctctacttgtggtaggaagcttttgggaagaaaggggtagcctccttctattccaccatccaggaatacattcgttcctacaaagtacaagaaggattcaaaggtatacatgtgtcaaaaatcacaatgagcactgtaaatatatgcaatttttattcatcaactataccttaattttaaaaattaagaaaagttcaaaggtgttcgaggaggaaggcattctggggaatcctaggaaagtcacctcaatgtaggaagaacatattcaggcagaaaagagagcagtaccagcagctgctggaagatctaagagaagcttgacactcctggccccaaacactgcctggctacaacacgatatccagggacagataccttccatgtacagcaagctgtggagtggcaagaaagcaaagcacgtaccaaaagcaggcaggaagcagagctggctggtaaggctctgaggttactgcaggaagcaggtgttgcctctgcctttcaccagcttcttctggagaagaacagagaaggggaaaagaagaaagatgctccagataccatctttggtggaaacagctgctagctctagcaatgatgactaagtcaattttgctaaagagcaaagaagctgtgtgtcttggattttaaacagcaatagactagcaaaataatctatgatgtgaatctgagattttacaccctagactcttttaaaatgtagtgactaaaaatatataccagtggataaatgaagtcagggatatacttgaaattttttctgccagagtagaaatgacttcaaaatatatgataatgcagctttcatgtaatcccagctactggggaggctgaggcaggagtattgcttaaacccgggaagcggaggttgcagtgagccaagatcatgccactgcactccagcctgggtgacagagtgatactctgtctcaaaaaaaaaaaaaaagataatgcagctttcaatattataagctttatgttctcacacttctaagtgataatcaaatgtgttacaccactttataccctgagatccaaaatacataaatatttgacagtttgtacaagactgtattaataagaaaatgtggcacatgtataaagaaaggaatctcacagattaaggaaaatgacattgattacaaatgtcctcagcctgagttggctgtgttgcgtttgtacacttcagccctctgagctgaagtgggagtggtttctctcctgaaaatgtttctgaggcccaaatagctgaagaggtggagacgttacagaaaccacctggagcccccagaactggcagacacctgcctgatgctgccatgggcccccagctccttggctatgtggtcctttgccttctaggagcaggtgagtcccagaacacataggcaacttttggccttattttgtaggcctcagcccaaggcatctcctaaaggcttaagcattggagatccccttcagcgctgcctctaactctgtccccttcctttacaggccccctggaagcccaagtgacccagaacccaagatacctcatcacagtgactggaaagaagttaacagtgacttgttctcagaatatgaaccatgagtatatgtcctggtatcgacaagacccagggctgggcttaaggcagatctactattcaatgaatgttgaggtgactgataagggagatgttcctgaagggtacaaagtctctcgaaaagagaagaggaatttccccctgatcctggagtcgcccagccccaaccagacctctctgtacttctgtgccagcagtttatccacagtgttgcacagccagctgctctctgcacaaaaacagagggtagctgcaagaacaaggagactcctccttcaggagacccctcaccgaccaacaggataaacttcctccatcatcccacagaagcccttccccacacgccagcctcagggactctgcaatgcagccactctgtggaaccaggggtccatcctctacctgctgtaccaatgaggtttcaaagttgggcaggacaagctcactgagttaggtctagtgccagggtacactctcccatcctttcttcttgtggagcttaaatctttaaattcaactaaactgttgcccaaactgaagactccatttacaatctaatgggtctcaacaatatttggttctgtattccaggtcctatttattctggaggttttgtcacttggaggaacaccatgtttggagttatttatgaaacccagcacctcctattttcttcctctcagcagatggtccaaatgcccaagccagagatgcaagactgatcttcactctctctctgactttctccttccacaccaaatccactaccctatcctgcatttttctaagtactaaattcctcacaaattttactaacttttctaatttcactgatctcacctggatcactttagccaccttccaagtagccaccctacctgcaagcctgcacctgctcccacccaaaaccactccctcaagcttaaaaccctttggtttatttctattaactagctaaagtctcaagtttatgttagtttgcaagtctctcagcccctccatgatgtgacctttgcatatcccccacctttctaacactgacttcccttatccttcaactaccacaactgcctgcatctactccagaaacatcccatttctcgcacatccccaaatatgtccactgctgactcactcctgggtctttatctacaatggtcactctacccagaataccatttctctctctggtattcatctgttcttccagctgctcttttgtgcagactgcagctggctgtgcagcactgtggataaactgctggtgcaaatgtacagagaggtctggactgggcgactccaggaatgggggagattctccttcatagaccaatttagaagtcacttcctccaagacgattgccttgaatcattgactggattatttctccgctgtgtgttcttctaacagcctgaacagagctaacaccaacaccgagacaccaccatgaactcaccagccattgacttctctgttctatagctttttgcctctttggaataggcatgtcatgggtgcaggtatgacgtccttgaacttggtttgctagaccctacattaagcctttttctggtggttacacatcagtatatttcctaagttctctctttttagccacaatgtccatgaatgctggtgtcactgaaatttcagtttatcaagtttcagagtcagaatataaagttctatattacaaccagaatatgttttatgaccaatatgtgctgagccagacaagaggcaggaatgaagctccaactaatctatttctcagttggtgcttggagtacaaacaaatagagagtctctaatagacctgtgtctcttgagataagactgagcatttcttttttttaatatatatatactttaagttctatttcttgcaacctccagacatccagcccttcatagacactgccagccgttaacccgaagccctgcacagccacttcctctctgaacagaaaagactgccacaaggggagagacggtcttaccttcctgagcctgcccttgccagaggaagccactgccaccgcagaagcacttaggagcctttcccacctccttgcactgagacttatggaactcttgagggccctagtctgtaaaagtccatccccggcctggcgcagttgctcatgcctgtaatcccagcactttgggaggctgaggtgggtggatcatgaggtcaggagttcgagaccagcctggccaacatggtgaaaccccatctctactaaagatacaaaaaattagtcaggcatgatggtgcacacctataatcccagccacttgggaggctgaggcaggagaattgcttgaacccaggagatggaggttgcagtgagccgagatcgcaccattgtactgcatcctgggtgacaggatgagactccgtctcaaaaaaaaaaaaaaaaatctatccccagatcacggtgcgcctgtgagacagagctgtcaatgtcctctttcccttccttctcatttgctgtttcaatagggcttcatcagcctgagttctttattagaattgacctgcatcaatccagtgcccccctcataccacctactagggaaggctgcattctacattacggtcttcagggatcctctctggggccccacatgcttccctttttgtttacctgtgtctcggggcaattttaatcttagtcttatacttttcatttaagcaggttaggctacactatacacttacagattttgccagtagaagctttgagacttcacatcttgtaaaataaaaaaaaaaaattgtactaaagataacaatgtttatggttgtgaagctttttttgtaagcaaatagtctggtgaaactgaagttcaaaggtgtttgtgttgggtagctgtgtcagtatgcttgatttatggtaaggccaagtctgttggattagatattagatattcacagtaatgtcaaaactaaggaatatagtctgaataattacaataactattttatattattgcaaacaacttaaaaactattgtgacttgattgattcatactatgcatggatacagtttcaaaacctgtttagaccatcagaaagttttaatgaataatgttagcaaaataaccacaagtaaagtgttaccggaaaatgcagtataagcatcacactgacagttgtagctgacccttttgttttgatcagtggttctcgatgtgtaccaaaattacttggtgagatttctttttattgtgggaataacacttagcatgaaatctaacctttaaacaaaactaatgtgcaatatgatattgttaactctaggtacaatgttgcatagcagatttctagaatgtaattatcttgtataattgaaactttacaccaattgaatggcagctcagttcttccttctcccattttcctggcaattatcattctgttctctgcttctctgtgtttgacataatgctaagtgaaatgagccagtcacacaaggacaaatctttcattgaaggagtcttttatcaccaaaagtatttagaattcctggcacttggtgataataaaagcaaaaccatttcacttgggttttatgattgttttaaaatgctttgcaccctttatcgcttgcacctggggctgaacacacctaccaccccattattgatataccaccatctccccaaccccatcaggtaaacctacacatgtgagcactcacatgaacctacacatgtggatttgaaccagattcaaacccaggcagcatagttccaaagcctgccctattacccaatatgctacttgtagtaattattaagtatattgtatgagaaactaagactgctctcaataaaatatatgttgagagtgaggagagacagacagagagagagagagagagagaaaatggtaaggttttcctaatcacagttggtcaggaaaaaaattaccttcactttcaaagactgagactcaccagaaggactcatgggactcggcgtgtccttgtactcatagcaaagatgtatcacaaatatgtagtaagaatactatgatcacaaggaacaaagacatggtggactttggagaaatccatgtgagacttccttatgttctcttccatgagagagcacactctcaccccaacaatgaaaatgcagcaacgtgagaacaacctttctgcccagggaagctcattagagactcagcacctccaatactttcagtggctggtgttaggtgctgaatcgtgtcattaaacattcatatgttgaaatcccagcctccagtactaagaatatgactatgtttggagataaggattttacagaggtggttaaggttaaatgaggtcctcactaatatgactgggatccttataagaagaaattaggacacaaacatgcatagagggaagacaatgtgcagacacagggggaagccatctacaagccaaggagcgaggctccacgagaaaccaaccatgctgacaccccgatcttggatgtctagtctccagatgtatgagaaaatacatttctgttgcttaaatgacctagtctgtggtgacttatggcagccctcgcaaaataattcagctgatcacattggcaccctctgcctatcatgcagcataattccagacttgacgtaaagcaagtgttcagcctaacccacgtggtttgtgcaagcagtctagacacactaagccatgcttaccagttactatagtgggaacactcccaaaattcaagttcgcagatgcaaatcaagagccaaccatgcaagcagtcccttctaaggccagcagtctcaggcccgctgtgtcaactcttttctatacgtgcacatacacacagtgacacttccatgagcacaagggatgtccttcactctctagcacctctagaccctttctagtctagacaatggctgagggattatgagagtgggccgggacaatgacatcacagaccatcaacccactgcctggtcctgggagaagacctattctttcttcaaagcagccatgggaatcaggctcctctgtcgtgtggccttttgtttcctggctgtaggtgagtcctgggagttgctgggtctggggagttggtggcaacccctgtcctactattttgaggtcttttataccaagctcttttctcctctcctccttgatggcctgtttttcacccttgctttctgtctctcacaggcctcgtagatgtgaaagtaacccagagctcgagatatctagtcaaaaggacgggagagaaagtttttctggaatgtgtccaggatatggaccatgaaaatatgttctggtatcgacaagacccaggtctggggctacggctgatctatttctcatatgatgttaaaatgaaagaaaaaggagatattcctgaggggtacagtgtctctagagagaagaaggagcgcttctccctgattctggagtccgccagcaccaaccagacatctatgtacctctgtgccagcagtttatgcacagcgcagcacagctgcatcctctctgcacaaaaagagcggacgtaagagagaaggggccctaactcagggctggtgctggctccgatggcacattcgtgctaaatagaaaaaaagcggccactaaggagaaactagctccataagcacacttctttgcaaggagagaatgaggtattatttttcacccctttacaagtcagggactgttctggatttaattcccccagtccgatgtgttgtaaattcacaagtcccaacaaggaggaaaagtcctctcgcatattcacagtgtaaccctgttctaccatttcgttaatcaattttaccttcccttttctatcctcgtctctcttaactgtgcattttctactttgcttagtgttttgctcttggttgacatttcactagaggacattaacatattctaaattctttcgatgatttttactgtgcctgtgctgattcaagagaaagtttgtggaatttgaattttgttcattcaatttagaaagagaaaaactctgattaaaacaaattcttccaggttctccgatcaatcatattttgctggaaaaaattctgatcacagaaggtttaaactctgctgcagaaggtggtaggaatttggttataactgaactcacaatcttctggaaaaagtgtgtatttgtctgtctttaagaataaaacatatgctcttctgtcagtaaaaattaacagtgctttggaaatacaaataaatgtaaagggtattagaaatcccaaactgcagagcacttgcacaattattattggcaagacaaaacaggcatctgaaaacgtattttgattcagtgctaaatttttgtgtggaagaagtcagagaaaaaaattgaatgaatgtgtatcacaatattcaagattaagtttgtgtgagataggacttgagctgattttgaatacaagtaaatgagggaagagaaaccatcaaaaggaagaaataccctgcaaatgtttctgtgagagagtctaccagaaggaagaggaagattctttccctgaggaaagacaggaatcacaattctcctggctgaggtcaacatccagaacagagaaagcacatcttcccagaatatcattaaaatcctttcccttttgcgccgagaatacatgctagcggtgcttgcggctgcagcgtttcccctgagataacacacaaggtttgatacaagaaattctttctccaccttctaaacattacagtgcttaactcctacatcctgttcaagaaggagaattctgagcacacggtttgccatagaaacttcagactgacattgattaaaaggatgctgaaaaagcatcgtgagccagggcagcaacgtctctggggtcgtccacgctctgatgatgtcacacctcttggcccacctggaagacattttcccaacagcattaccaccatcaaagaaacaaaacccaactggtcactgcacttttgctgctcacacaatgacgaggatggcaagatctatagagaacggcaatatttttgtgcggaatgtgatgtttcactttctgttgttccgtgctttgaaattttcccacacgaaaaaattatctaatagtgattattatatacatttctgtgatgttaggattagaggccagttctgtttagaaataattccaagaacagtttttatattttattttcatgttgataatcagtcaaatttgcttcagcctcaaagagcatgtttatgtcaaattaaatgaatgctggcagcgagctgcactttttttactaaacaggaaaagggttaaataacagaacactgtatctacagattttcatattcagtgaaacttcaggttttctgagagtcctacattttcccacagattatttatttcttatagcaagtattgcccagactcagaagatcaactgcaagagatgggaacaggtaccagcactttgcgtccattcccagggctatgtgggaccatttccaacacaggggtcatcacctcaattgagtccctggtagaaagagtgctatgccagactcagcttcccttctggcatggttaccacctgctccctccaacacagcctcaccttgctaagaaaatgcagcccagggagagaggaagaacacataaaaaaatgaaaatgaaaataggcagagatggagtatcaaacatcaaagtgagtaacagaagacatctaaagaggtcaaaaggattgtagattgggataggaggtttgaatttagaaaaaaaatgaaaaagtgttcacgggggagttcacagtttacagaatagactttttttttcttcttcttttgaaatggagtctcgctctgttgctgaggctggagtgcagtggcacaatcttggctaattgcaacctacacctcccaggttcaagtgattctcctgcctcagcctcccgaatagctgggattacaggcgcacgccaccatgcctggctaatttttgttatttttagcagaaatgagttttcattatgttggtcaggccggtctcgaacgcctgacctcttgatctgcccaccttggcctcacaaagtgctgggattacaggtataagctaccacgcctgacccacataatagacttttaaaggcacataatagatcatggatgtttaccatgagggtacagagaataattcagaaaatgtaaaccattatttcactaaacatacataaacatacatcacattaggagaccaacaaattcacagaacataaaaattgatactctaaatctccaagtaagcaatgtttgtttatctatttatttatttatttatttattttgttttactttaagttcagggatagatgtgcagaatgtgcaggtttgttacataggtatacatgtgccatggtggtttgctgcatctatcaacctgtcatctaggttttaagccctataagcattagctgtttgtcctgatgctctccctcccctcgcccccgacccccaacaggccctagtgtgtgttgtttccctccctgtgtccacatgttatcactgttaaactcccatttatgagtgagaacatgcggtatttggttttctgctcccatgttagtttgctgaggataatggcttccagcttcatccatgtccctggaaaggacatgatctcattcctttttatggctgcatagtattccatggggtatacatgccacattttcttcatccagtctatcattgataggcatttgggttggttctatgtcttttaagcaatgttttaaattatgtgatttgggaaaatataacaaaataaattattttttgttgaatgggagtattaacagggctctttgatgggacatggctgggaagatgtctggcctcttcctgcagggaacaaggaaaatttagagaaggaggcaatttttttttctctagagtccactgagatatcacaggtagtttatacatataaaatacagcagccctgacatacagatattattttctcctaattaaaaataaatttaaataagtgaagtgtaattaaacctaaatttaaatgacttgcctataacctcacagctgaaaagttagtggaaaggcatgtttctatattgttttttaaataataagataattgaatccaagataggtatatttccatcttcagctgaatgggtcccaagaccaaccattaggtgaaagacgtaatccacacagccagggaattctaccttctacctttgtaacagcaagatagccatagcaccaaagacatttttaatgtcttagcacaagcttctaacacctccattttgaagtagaaggatgaaggcttgagagcagaaactggatcttgttagtgatggacaagtggacatagtcatattaattgtgcgttttacaagattctttgataatcactattaaaccagctgtagatacactgtatcatcatttatctcccatgtcaccatcatatcataagattaacattgatgactttgaaaatttgctgctaaaattaaattatctcaattttccagtatcctcctaactgacctagccaattttgtatggcttgaaaaattgggaagtcttctcatctgtgctagatcttcttcaattaatttcaattcattaaaacagaaatagcaagaaactaagagtcaatggggtttcttcatcccatcattccctataaagggcagtgacaagcacctagatgtaacatagatttcttctgccctctgttgagggcatcagaactggctcagttcactcagacatcggtggcagaaagttgagggagatttcctttatgcttaagccttcagtagaataaactggtacctgttctatccaatggatgctgtcttatttaacttgggacactgaaggggtactattcactaatgaaaacattaaaaagcagaccataagatattttaaagaaagagaaaacataatgaaggatgtataatcattacatagtgtatcagtctgttttcacactgatgataaagacatacccgagactgggaagaaaaagaggtttaattggacctaagagttccacatggctggggagggttcagaatcatggcaggaggtgaaaggcacttcttacatggtggcagcaagagaaaaatcagaaagaagcaaaagcagaaacccctgagaaacccatcatatctcgcgagacttattcactatcatgagaatagctcaggaaagactggcccccatgattcaattacctccccctgggtccctcccacaacacatggaattctgggagatacaattcaagtagagatttgggtggatacacagccaaaccatatccttctgcctcagtcccctccaaatctgatgtcctcacatttcaaaaccaatcatgccttcccaacagtcccccaaagtcttaattcgtttcagcaattacccaaaagtccacagtccaaagtctcatctgagacaaggcaaatcccttccacctatgagcctgcaaaataagctagttacttcctagacacaatggggatacagggattagataaatacagccattccaaatgggagaaattggccaaaacaaaggggttacaagtccccatgaaagtctgaaatccagtggggcagccaaattttgaagctccaaaacgatctcctttgactccaggtctgacatccaggtcatgctggggcaaggggtgggttcccatggtcttgggcagctccactcctgtggctttgcagagtacagtctccctcccggctgctttcacaggctggcattgagtgcatgtggcttttccaagtacacagcacaagttgttggtggatctaccattctggggtctggaggacggtggccctcttctcacagctccactaggccgtacccaggtagggaatttgtgtgggggctccaaacccacatttcccttctgtgctgccctagcagaggttctccatgagagccccacccctgcagcaaattttgcctgggcatccaggccttctcatacatcttctaaaatctaggtggaggttcccaaacctcaattcttgacttctgtgcacctacaggctcaacaccacataaaaggtgccaaggcctccaccctctgaagacacaacctgagctctatgttggcccctttcatctatggctggagtggctgggacacaggacaccaagtccctaggctgcacatggcatggggaccctgggcctggcccattaaaccagtttttcatcctggacctccaggcctgtaatgggaggggctgccatgaaggtctctgacacggcctggagacattttcccatggttttggggattaacattaggcttcttgtgcaaatttctacagctgtcttgaatttctcctcagaaaatggttttttttccactgcattgtcaggctacgaattttataaacttttatgttctgtttcctttttaaaatggaatgcttttaatagcacccgagtcaccttttgaacactttgctgcttagaaatttcttctgccagatacgctaaatcatctctctcaagttcaaagttccataaatctctagggtggggagaaaatgccatctgtctcttttctaaaacataacaagagtcacctttgctccagttcccaacaatttcctcatctccatctgaaaccacctcagcctggaccttattgttcatatcactatcagcatttttgtcaaaggcattcaacaagtctctaggaagttccaagctttcccacattttcctgtcttcttctgagtcctccaaactgttccaatctctgcctgttacccacttgcaaagttgctttcacattttcgggtatcttttcagcaacaccccactctactgataccaattttctgtattagtccattttcatgctgctgataaagacatacctgtgactgggaagaaaaagtttaattggacttacagttccacagggctgcggaggcctcagaatcatggcgggaggcaaaaggcacttcttacatggtggtggcaagagaaaaaagagaaagaagcaaaagtggaaacccctgataaaaccatcggatcttatgagacttactatcataggaatagcacaggaaagaccggcccccatgattcaattacctccctgtgggtccctcccacagtgcatgggaattctaggagatacaattcaaacagagatttggatggggacacagctaaaccatatcacatagtatatattgaaaatgtattgtcaagtatcttggatgagatacacattgccagataccatacagttacctgcctaagaaaataagccaataattatagtctattaatggtaacattagacagacaaatgcttacatggtaatgccagagcccatggtttgagatgctctgacatgtgatgggtctcatacatcactttcttgtctaaaaatagtagctaagtgttctgaaaccttgccctcaatgaactcatatttcttaattattgccattctgctttacaaatgctcaaaaatctgcatatttaatattcagttatgaatatattttatgcatgtgtagggtggcaggataagaagagggatgatgttaaatttactaacttataatttctaggtgtagaactattgcttgcccatatctgaatattaaagctatatttgtccttctttgaattttgattatactgtctcttccattttatttattaaaaattatgaccagagagagtgtgtgtagttgatacccaaagcagaaaatcaagttatagatgactagtttataaattaaacagaaatcccttactctcacccttcacagaccatctaagcaatacatcaaatgctagtagccaacattcttctttttgacaggaaactagaagtttattctaagaaactaaataagaagatctcaagccttggaattacatggcatatcaagagtgatatgagatgcagggctaaagacaaagagaataattgatatataaatatatagtctcatatagtcaattatccagtttctcttgttgagaactgttaatgatatgagattttaccatacttgcaagctaagagcttgacaacattccatggatgctagcagaagacaagagactgctggattacagacaaagtatttttaatactctcaacacagcaggcagcatgagcttcatatgtctataagtgacctgtgcctgcccctctgcccagttccccaacagtgacacagagcagtttctggatgctgtggcttttcccaaacctcatcaatctttgtctcatgggggtacattgtgtttattatcctggatagcaaacagatccagagggagatgttgtctctgtcttccaggttgattgctatacaaacattcttgacaagatagtccaaatgaaaagttgatataagttgtgcagaaatgtcagagacccatgaagaattaactctcaacacctctccactgcctttggcacagaacaagtaggtaactatacccacagtagcataataatatatttttatttgaagaaattgagcagcccctgaaaagagacttacaaatactgatatttcagtgtcccttacgaaacaaccagttccccgccaaatctcttcaagtaaaatctcctagcaaacaagtaccatccatattaccaggctttcagtcaggtttttagtgctttactcttaaaaatcaatatacaatcaaagatcactagtatacaaagtttctaacatagatagaaaggaaaaggatacagacattaaaagaaagaagagaaaaagaaaataaaaaacaagaaacagaaaaaggaaatgaaattaaataaatagtgggaacaaagaaaattgactcaagcatataaaataaagaaaaaaagtggacttctaagtagtaatcatgtaaattcttgtttctatcccagacagatataagaaacacatcgtccttaaaacagaataagataaaggggagaaactttaagaaagtcaaaataaatttttaaaataagagtcaaaagaaaactcgatataacatcccagaaaatagaacaaaaagttcaagaagttaaataacagaaaacatgaaagaaaatataagtgacttgaagggtgaacaaaggagagtcaactgtccaagagaaactccagaaaaaagaaaaaaaaaatttttaattatcagagaaattataccctaaaaattagttcccagaaatgaaaaaaaattagcctccatattttaaaatgcctgctgttggctaattaatgtcagacaactgaaatgaaggcatatcttcatgatttcagaacactggggattaaatgattctaaaccacaaaaagacaaagaaaatgttaaaaatcaaaattatacttagagaaaagtgataaataaatgcaaaagtggaatgacatcacatttctacacagcaacgctgaattccagaaaaaaaggtgcaagaaatatcaataaaattctgatagaaaatcattttaatcttagatttctctactaacccaatatatcaataaaatgcaaataaaaagacatttttaataatgttaggatccaaaacatttacctccatctcaagctttcttaggaaattactggctagtatgtctcagcaaactgagaaaacaaaccaaaaagaaaaaaaaaatggggtccaggaaatagaaattctcattcagaataataagaaagaaaagtgccaggataaaagctgggcagtggaactaattagcaactagcccagactaaagcagagggactccagggttgcattttcaaatagtgccaaaacgtagactatggatctattaaatgatacatctgagtaactcatccacaattttgtagtatcagtttgcatggcctgtcaaaaatccagatccatcctggagaaggtgatcccattaaaaagaatccagattattcagcaatatcaaatataggtagaaaccaaaagacaaaaatctgctgatttttcaaaccattaaaaagattgatgcagttctggtaatggcatcataattcttataagacccacgctcccacaaataacaaatataaactcaggacgaacatttttaaagcctatcttaagggacagcaaagcaaccaatagccagtagaaactacagggaagtcaacacttggatgacaggtaagttttctgtttttgtagctttttgctggaaagtagttcccagtcaaatagaaacccattaaaaagccagctgtagagttaggaaagacatccaagaagggaaagtccaaaaaagaacaacccaatgttctccatacaaactctgtttgaatctctggttgatgcctaaactatgcatgtgagaggaatactggaatcagcagtgttaaacctaacataactggatagagatttcagctgttgccggctataggaaacagaatttgaagtataaatccaaccaagttaaatgcctgttaaaacaaaaatccaaccatcgttagaaggataaaacaaaatctagatatattgttgacaatgtccaagatacaacgcaaaaattaccaggcatatgaagaaaagaaatcacatgacctaatttgaatgaagaggccattagtggatacaaactttgagtttacctggatgctggaattactagactgaaatttaaagtagctattataatcatgtttaaggatataaaagaaaatgttcttataatgaataaaataggaacgtttataacaataatgaaacctattaaaaataaatgaaaaatttaaaatttaaactgcaatatttgaaaattaaataaaatctcactaaacgaaatctctagcagattagagatgacggaagaaagattcagaaacttgatgttatatccatagaaattacaaaatctagaaaacaggagaaaaaatatgaaaaaatagcctcagtgatctttagaaaaatatcaaaaggtacaaaatgtgtgaaattggagtaaaagtgaaagaagaggagatataaaaaagcatggataaaaaacaatatttttttaaaaaagcctaattaaaaagtatattgaaagacataaaaagaatttcagaaaaataatttgtagaacacctacctaggcacatcacagtcaaattgtccaaaactagaaaagaagacaaaatcttcaaacagccagagaaaaatcatacataccaggaacaatgacatgaataatgataatttttcattttaaaaaagtgaataccagaagagaagggaactgtagctttaaagtgctacaagaaatataaaaagtcaacccagaatttgatataaaatattcagctaaaaattaaaatactacagtaaagttatctgaatataaataaaaattaaaatatccattgacagtagaactacatgatagtaaatcgcaatggaattctcttaggtaaaaaagaaataataccagttggaagcttggattgtgaggaagaaatgaagagcacaagaagtagtgaaatgcagtcagatattaaagagtcttaaaaattctatatcatatgtaagactagctaaagtaaaaatttcatcattgtattataggatatataaaatatatataatacagaatgacactaaaatctaaaggatggaaataggaaaaacagatctattagatacaaatttcttatattttaagtaaacttctacaatatagtaagtagacaaatagttttaaatgtatcattctttattttccagaatagccctgaaaatattagaggtatagcaaaaagccaacaaataaaaatcaaaacagaatctaaaaatattattcaaatatttaaatagagtcaattctaggagaaagtttggtataatattaaaaaatcaatcaatgtaattcatcttgttaacacatttttaaaaatctatttgattatacgtacagatagaaaaaacttggtaaaattccaaactcatttataataaaaacactcagaaaattaggtaaaaaagggacttcttcaatctaacaaaggcacctgaaaaaaaccaacagcttatgtcacacttaatgacagaaatattaaacgtcttcccatttttatttcttaaatattaaacatgttcaagatcataaacaagtcaataatgttcacccttaccacttctattccatattgtactgatgcataaagacaagaaaaatactaaaaagctaggtatcaaaagataaagaaaacctttttcagagatgaaaggactacttacatgcaaatattaaaagaaatctatatattaactactcaaattagtaagttcatacattaatttattattacaacatataaaaattatattttgtatactaatgataaacaattggataattgaattttaaaacctgaatttatattaaaaaacataaaatatttaaatttagcaaaagacatgcaagacttgtgtacagaaaactaaaaacagttgctaaaggaaatgaaagacagttttaaaatatagaaatagaaataatgtcctgttgcagcctctgcctcaggagtcccctgcagcctggaacacctagcaaaagaaatgcaggtgcagtgccagggattggagctggatccccacaagtcctagaagcaaaccttgtgagggggccatctgtctccccgacccacctcagagcatgcctgtgaacaagaaagtacgagagccacacaagctgggtgttagcctagctaccggccgttactcttaagcgcatctactggatcacagcacaaactacaacactaaaattaccgtgctaatatatgcaggatgtgaaaccaggtgcaagaattcacccacatatgcggattctgtacagagccctggccctccgaaagcatccagaaatgaagccaactgaccacactcagcttacaccacagttaagggaacaccaaccctaccagatgagaaagaatcagcacaagaactctggcaattcaaaaaaaccacagcatctccttacatccaaatgggtcactagctccctagaaatggttcttaaccggtctgaaatggctgaaatgacaaacacaaaattcagaatctggatagaaaggaagctcattgagattcagaagaaagttgaaactcaatccaaggaatccaagtaacccagtaaaatgatccaagaactgaaagatgaaatagccattttgagaaagaatcaaaataaacttctagagctcaaaaatttactacaagaatttaataatgcaataagaagtattaacagcagaatacaccaagctgaggaaagaatctcagagcttgaagaccagttctttgaatcaacttagatgaaaataaagaaaaaagaattttaaaaaatgaacaaaactggccaggcacggtggctcacacctgtaatcccagccctttgggaggccaaggctggtggatcacgagttcgggagatcgagaccatcctggctaacacggtgaaaccccgtctctattaagaatataaaaaaattagctgggcatggtggcgggcacctatagtcccagctactcaggaggctgaggcaggagaatggcatgaacctgggaggcggagcttgcagtgagccgagatagtgccactgcactccagcctgggtgacagagcgagactccatctcaaaaaaaaaaaaaaaataaggaaataagaaatatagggttatgtaaagataccaaatctatgcctcatcggcattcccaaaataggagaaagagtaagcaatttcaaaaatatatttgaaaaatatatttttcaaaaatataaataatgcctaatataaatataaataatgccaaaaatcgcctaatcttgctagagaggttgaaattcaattccaagaaatacagagaaccctggctagttactatatgagacaactatccccaagacacatagtcatcagattcaccaaggtcaaggtaaaataaaaaaaattctaaaggcagctagagtgaagggtcaagtcacatacagaggaaaccccatcaggctagccacagacttctcagcagaaaacttataagccagaagagattgggagactattttcagcatcctgaaaaaaattcaactaaaaatgttatatcctgccaaactaagcttcataaatgaaggagaaataaaatccttcttagacaagcaaatctgaggaaatttgttttaagtagaccatccttacaaaaggtccttaaggtagtgctaaatatggaatctaaagaacctgctgccataaaacacttgaatgcatagcccacaggcaccacaaagcaactacgctatcaaatttacataacaaccagctaacaacatgggtatgagatcaaaatcacacacatcaatactaatcttgaatataaatgggctaaacatctgcttaaaagacattgagtggcaaactagataaaaacacaagacccagccatcattgccttcaagagacccatctcacatgtaacaacacccacaggctcaaaacaaagagaggggaaaatatctatcatgcaaatgaaaaacaaaaaaggacaggagttgctattcttatatcagataaaacaaacattaaacaatgaagggcattactataatgataaagagtacaatccaacaagaagaactaacaatgctaaatatatatgcatccaacattagaacacccatatccataaaacaagctcttcttggcctatgtaaagatttaaacaaccaaacaataatagtaggaaacttcaacaccctactgacagtgttagacagatcactgggcagaaaactaacaaagaaatgctgggcttaaactcaacatttaaccagttgaaactaatagacaaatacagaacactccacccaaaaggaatgcttatacactgttggtggaaacgtaaattagttcaggcactgaggaaagcagttggagatttctcaaataatttaaaacagagctaccattccacctagcaatcccattattgaagatatatccaaaggaaactagatcattataccaaaatgcactcatatgttcatcaccatgcaattcacaatagcaaagacatggaatcaaccgaggttcccatcaacgatggattggatgaagaaaacatatacaccatggaataccacacaggcctaaaaaagaatgaaatcaagttgtttgcagcaacataaatagagctgaaggccgtagtcctaagtaaattaatgcaggaacagaaaaccaaatactacatgttctcacttacaagtgggaactaaacattgagcgcacatgaacacaaacatgggaatgattgacactgagcactactcaaggggaagagagagggaggttgacacgggttgaaaaactacctattgggtactatgttcactatctgggtgcagtatacccgtgtaacaaaccttcatatgtaccccctgtatctaaaataaaagtgagaattttaaaaagactaaatatgttaaaaccagtactctctaaattttatctacagtcattaaaatctcaattgttatctcaactgtttttgttttctaagaaactgagaagctgattctagaaggtatatgaacacacaaagaatttatgggaagtcccgctcctggttagaagcctatgtatgatgtttcaggccatagataattaattacaaaggctttacctggctggtttacagggtgtggagaggctgttctgcccaccccagacttggtgcacagccaatgcattgcagtctttgaagggagttgcagtcaaggaccccctggctggtcacgcccttgtgcatatttatattgccagctcaggatccttcattcttaggtctctttttctgaggcctatgtagaggtcttcttcaggtgcctctgtcaaggcctcctaataggagaggaagagagagccttaaagacacttttctccactctgagtacccagtgagtttccactttctccttgcagggctccccaacagtgagacaactccatgtctgtgctaatccaactaacacttgaccagtgccatttccacagggaaaaacagaacagggggagtcagtaatttctctggctttagactcttgcttacactattgaaggaggtaattaaagatttaactctttcctttggggcttgttgctttaattggctcactacctggatgcaatatacccatgtaacaaacctgcatgtgtaccccctgtatctaaataaaagttgaaattttaaaaagaataaatatgttaaaatgagtacctaagtcctcagcactctttttcagctatgctgagctcctgacactctagaatattcaaaacaatatttagaaagaacacatttggagtcctttcactgtctgaccaagacttactataaacccacaataatcaaagtaatgtggtactggcaaaagggcagacaaataaaagatacacattaaaaccacaatgagatactgctaaccatccacatacccactcaagttaaaccacctggcaacaccaaatgctggcaaaaatttggagtcccagaactcacatatattgttgatgaaagtggataatagtacaaccaatgtggaaaatgttctaatagtttcttataaaactaaacccctctgatcatctacccctatgagccagcaattatactcctaagtatttacttaagagaaataaaggcataaatctacaaaaaaagacttaaactggaatgtttacagaaagtgaattcatcattgccaaaacctggagatatcttgaacgtccatctacaggaggctggctaaacaaacggtagtatatctatatggttacatattccactgccacaaaaaggaatgaagtactgatacacacaacttgaacaaatcttaaaaatattattctgggtgaaagaagtaaacaaatcttaaaaccattattctgggtgaaagaaactttgcacagaagagcgtatgatgttattccatttatataaaattctagaaaagaataatttataatgaaaaaatcagaacactaattgcctctaaggagttagcagtgggaaaaactaaaggcatgagaaaactttggagataatggtaatattctacaatttggtaggttacacagtgtatgcatttgtcaaaacttgtttaacggtattcaagatttgtgtgtggtgctgtatgcaaattttacctgaaaaacaccttgaactccagttaattatacacgtgctgaactgcttagaagtgaagtatgcctccaactgacttttcaatgaattaaaaaattagatggattgatggatgaatagaaggatggatagatggatagttatgtggtaaagcagtaacagttttatccagaacctaggcggtgggtacatgcatgttcactgtataatagtttcagcttctatagatgtttgaaaattctcataataaaatggaaaataatggcatgattctgtgtattttttaataaaatcaactttgaaatatgctgataagaaccacattgctaattaaagaagtgaagtacaggaaggtttgggctgtgtgtttctgtgtaaaagaaggaggagtcagatttacataaacttgaacaagcaagaactattatttctaagaacatgtagcaaaataattacaagactgtctctggagaaggaacttaccttttgttctctgttataattgaatcattaaccaggtgcatgtattaattcaataaataaacacattaaaattcaatgagagtttagtatccataacattccccgagagaaaaatctagagaccactgcagtttgaaaagcatgaaaagggagaggaatatgtttgctgttttttgttttttgttttccaaacaaagagaatactgatgaagaagcaaagatttggaatttagtaaagaatagggatcatttgttaattttcagaagcttttaggataaataaaatgaaaaagatgctgggttattttggcatagagtttgatacacttgactaaaagatttaaaaatatacctacatgtcaagaaaaactgaagtattctataccttttactacttctacttagcagagtttatcttgagccactgtccgtggcatgtccaataagttgtaaaggcttcacacacactcctcatatgaacaagttgctgaaatattgttaaagtgtcacattttgtccattataaggtaaattgtttttcacaattctattttctttgaaatacgggtaagtcctataatcaatcttcacctttaatgtggtagtactaaacaccacccaaaagtaacaattagatatttaatagaacatcttataatagagagaatctcagaatcaaataaataagatgggttagtttttgcaagcctgtctttctggagtttcctagtattctttagagtgttaggcctatcattctcagttacccaccagactgtactttactaaggcacaggcaactgcaagagtcagacaatacttgatagtgttgatattgacacttgagatttgtgatcgcataggcattgatttgagtcctgactctgttacttactcttggattatatgaacttggataggttatttaaggtctctaggtcttatctgtaaaatttcctaatccgtaaaaatagtgtgatgataataaatagcctagccaaaaaaatagacttaaataaatgtatgaaaagtagagtaagtgctcaaaaacttagctctgcttttatgcaaaaatgaactattttaagcagttacatgatacgagaaatcagcttgataatggaaaaagatcataccattgtggtcaagttttacacaaacatgatctgtttcgtggcctagactgagttgaattagaatagaagaaaccatattacaagtattcaggaattaagcaaagacaaaaaaaaatagttatgactgtgataactgaaacaagggaagagatataagagacaatgcatttaatttgtgaattgacaaataaggtaggtgaggaaaaaagaggcttatggaattcttgaacctaacatgcaagaagagcagggatgccatttgttgggagaggggaattgaggaataagagcccgtttattggtgtgtgtacgtgttgggggaggaaggagttcagtttgggacaaccatgaagacccagcagacagctgaaatactgtaatgaagttcccttatattctaacatattacttttagttctttgaagtcaattctgcaccccactttttgctctacacccagacagtagcacagattggtgttcagtaatgacagatggaaaagtgatgggagaatggtggtgagtggctggtgcatgctgtgagacttgtgcatgaagactcatcctgagtgaagagccacacggttccaccagggggaagactgatttttgcatatcatgcagaaactcaaccacctgttagaggagggaaacagagtgggaaggaactacgctgtaggaaggaaagatgaacttgagtttcacttcttagtgccttttctcaggggagaggccatcacttgaagatgctgagtcttctgctccttctcctgggactaggtatgagccttgtcttttgaggagtctggggttaatgttaacactgggtggaaagactttctctccagagagtctgaagccaccagacagaagatgaaggggatatgttagattaaagaaccataacagagtaattgttggcacaataaaaaggaggcagttccctggggtcctttgggagctgaggtggtattggagagataaagcagagaccttcctgcctggggagatgtctgaccccaagcttgtcggtcctcatgaatatctctctggaactaggctctgtgttcagtgctgtcatctctcaaaagccaagcagggatatctgtcaacgtggaacctccctgacgatccagtgtcaagtcgatagccaagtcaccatgatgttctggtaccgtcagcaacctggacagagcctgacactgatcgcaactgcaaatcagggctctgaggccacatatgagagtggatttgtcattgacaagtttcccatcagccgcccaaacctaacattctcaactctgactgtgagcaacatgagccctgaagacagcagcatatatctctgcagcgttgaagacacagtgcggggcacagatcaaagatctgagcaagaacctcagctctctcctacccagctcctctcacacgagcctgaaggccctgccaaggtgggacagaaggaggaaaccacagcttttgggcagacacagctgtttctgtgtttgtgggtgggcatgggtatgaatggatagactggggatgaggagagcatctgtaggactagctggagcgttctatccacaggcaggaagagtggctcctggaaagctgagggtaaaatttcttctagaagggtgctcagaaatacccaataaaaacaatcagatacagtttccttcaagtggcggggtcagtaatagcctttaactgttttatctcaaggctctttttagctggttttctatcataatatattttggaagaactttagtcatcttgaaacaaagctggtacattatattaatgacatctggttgttctcagtgaataggaatgataaagccctctagatgcttcaatatgacaatatgacacatgcatcccaggccaatataaaatctgcaaagttcaggaactttctatactggtgagttttggagtggtccagatgtaagaagtaagctgctgcaccttagatcatgtaccacggagaaagaggtgcaatgcttagtctttggactttgaattaaactttggatatactgcatttgattgtgctactctatcccatttactatgtaatctgtaaagctggggccagtgcaagagagggttctgtggcagaagaagcccatgatgaaagcttcctgctgcttgggccatggactaagcagacccagttgttcttgaagagcctatggtagatactgatgccctgtggagctcctgacattccccaatacgagaatcacaaggcagtgtggaacaggtttgctgtgccctgatttgcacttcagaccattgcatcttgggctatacttttgttgctttccagatcccagagagaaagaatgctcacacacacaaattacatgaggagtgtttattacttacatacaggcagcaagggaaaacagaggcctaagattcagggaaagccagtcccactaggctcaggaaagctgcccagggtggatgaaatcttgtctgtgccttccctacttgcactgccactgagggacctcagagagcagccaccctgggttttatatcttagagcaacttgacatgcttggcaaagcattgaaggacattctatttctagaagggactggaacagagccctggctgttctggccagttcctccttatctcaggatgttacagtcccagaacattgtacagttatttttgagaactacaagcaagaaataggggagtactgagtttgtccaaggccacctggagaattgccctgcagacaggtgcagagttttggtgtaaagccatactcttaccggccaacgatcccctttcttttgaaaagttgctcctggctctataatggatgcctcataatggcattcagaacaaggtattatctgatctgcaaaactgtaaatttggctgtgcccagagcattctgttattaaatggaaaatacataatcaagaccatacttaagcacagctggaaaaaggcacgattcaatttcaagagcacatctcagagtctcatgctacccactcatacttttctcctcttaccttcaaaccacacccaagtttcatggaaattccatatttccagttgagaaacatgagcttatttttttgatgggtcttcacattattctggaaggatcattacagtctaaccaagtatggttctgaaaggtagtggtgaagggaaatcttctcggggccaaaacttaaattggtatacctgattgttgtccacattttattgaagaagagatggccagaagtatagctatatcttatgttcaattttctttcatactatcatctagtctccttacctattcagtcatatttttcttctttttgcttctctatgctacaatctgggtaatttctttaaaactactgtttagtttactaattcacacctcagctccagtaagcctctaatttaatctttcaactgactttgttcatctaaattatattaatttttatttctagaaaatccacttgggtcatttacaaatatgagtggacatttttgaaagcatcttgttccttgtgtattttaaaattattttctttttataagtatattaagcatctactgggaattattatctgacaatgccagcatttgatgcctttttgcatctggctttcagtggtctgctggctctcactcagggtagcctatttccttgtacattatgtaagttaatgtgaattcatctttcagaattctttaaatactggagtaaaagtgggttttctaggaaaattcatgtttgcctctgtcaagaaattggggcgctacagacctaatatcattttattttataattctcagtatatatcttcttggtcatagaatgtctatctcaaaccccaatgggctgactgttcagtgaccatgaatattcagaggaaattttttaaaatccttcacccaaagccaagaccaagacaaataatattctttgttaattgcttctaggattagttttctagctcatcctttcactaactgtgtatctctttgtgtacctcactttaaaaagcagtgattcctgtctagtttctggtccatgtaaggtctcatgggccttctccagtttccatgtgtactaattctccaggtcacaggaatgcacatgtatacctgttttatctcatgggctcagtgctagcttaccttcctggcccatgctcccattaccataggaagttgacaaatttacctacagtgaagccttggattatgaagcaccttcctatattacaaaattgcctctttaaaagcagtaaagcactgtggttaggaacttgaactttgtcaagtgacagacctaagtttaaaacttggttcttctgctttaacactaggtgtaaccttaacaagttacacaatttctccatgccttaatttctccatagaaaataagaataatagtgagtttttaaatgtaggttttttaaaataagaaagtgatacaattatctgtataaaaagcacatagagacaaaatatgcaattagtgtagttgctacctaaacgtatttctcactataaaaacatattttaccactggcaattccttcctcaagaataagtatggccctctctcagaaaattttatcattacaattgtttctcttttagctattttaattaaataaaaaatttgtggtattataaaatatgcatattatcaaaataaaaaagtcaaaatcactcagtttaataaaattagatcatacaatatgtagttttagaatttattcccttaacccaacaatatttcatgaatatcatttcatgtcaaaaatattttacattaactttaataagaatagttcgatatactgatgaccatccttcatacaatcaaaacccatgacaaggtatatatccataggctagatgacagggttatttaattttaaatagcaattgtttgtgtgcgttgaattatttctgttgcagactcagaaggaaatcatgaaagccctaagtctacctgcagatggctggttcttttttattcaggtgttaacttaaatgccacctccccaaagagacctttcctgaccactctacgtaacagcacttcagcagtcatgccatattatattatcactttatcctattttagtaatatgtactcatcatttactgaaagtgatgtatgtgcatcccatttctatacctcctcatatgtgcataaatgcatgcacatgcacacatgaatgcactgaaaacaagaaccttttctgtcttcttcgttgctgcttccaaatagcctagaagaactcttggaatatcactccaggaattcaataaatatttgtgagtaaataaatacatttcaaagataagaggaaaatttatacagctgcagtggatttccctggtggaaaactctacaaaggcatttgagtttagataatgtaagcccataagaaaattaactagattattctaacaggaaaggaataagcacttcaaactttatattttttattcttgttttaaatttatgttttagttgcggggaggatacaaaaagattaaaggacacaaaattacagctagataggaggaataagttccagtgttttacagaactgtaggaggactacagataacaagcattgtatttgaatagaaaggtccatatgtcatgtgccaaccccgttctgctgccttacccaagactgggaaatggaacagatgatatgggttctatagagaggcaaagtgcagaacctgctcaaacacagtggccctggggtggaaagttctcaattggaattgtgttggtgcctgtgtggatggagcattcaattctgagccttaggagccttttgaaggccctcctggccaagatgatcttgaggaaatgactgacccattggctgccttccaaatggatgacacagtctagacttttataaactacatgagtagaaggaacccagttgactggatttatcaccaaacctagcttgtgagcctcagtctagagctagcataatttagaaaaataaatgcatacatcatatattaaactctgagtatcatgaaacagatcctagatgttacaataataagaacctacatgggtgtttctcctgcactctgtcctggctttcttctgcttcttgtctaagggagcctggactcacttaagcagctctaataggccaaacaagagagtggtcaaggagtggctgaaatgtgaacagaaagactcaccattatattagagcaatcaatctatccttaaaatactgtgggtttagtgtcaagtgctagaggcttccccatttacccatacatggaagcctgaagaataaacagaactataaacttccctctgggcataaaacttgcatgtcttccacggcttcaaggtggggagcagctgggcaggcagaaggaggggcaagaggcagtcaagaggaggggcgggaggcaggcggggaggaatgggctactccgtttagctgatcagccttgaccagttcatgctctgggactccatcttacaagtcagacttttccgagtcacacagagcactcccttcactctccagattcaatgattcctgggatgatatagtaacgaaaataattccttattggataaagaaattgtgctgtgcgggagataagtagcttagaaaaaaaaatggatgaggagaggagctgggagtttgggggtaagacagcctaaaatctgacagtctggttggggaacgataaaagatactggaacccaaggaggagatcagtaagaatgtaggagaaagatctggtgggatttggagaagaaagtgttaaaaaataaaattggaatatgacagtttgcagactactaggtctgaaagacgcaactctgtagcaacatgaaggggaacaaactttgtctgaatagggaagtttctagtatgatctctgctttccttagacaagtaaccctggagaagacacttgacctctgagctttagattgttcatctgtaaaaaggagagaacaatatctgctgcctaccacctcagtgaggctgcactaaggatcagctcagaggaggcaaagcagaatgccctattgcacagcatggaggccctagagtcggaccaccatacttacatcccatctttaaaacctcctggctgtttggccttgagcaagccacttcacctccagaaagttcatttgatcatctgtaaaatgggcaagcccataggtggttgtgatgataaaatgaaaaaaaactttttaacttacatgagttacatgctgtagagtaagttatgtggtatatagtaagcacacagaaaagactcactgttatcaaaattaaaggaaagtggtttagtgtgctaagcactaaatacaagccagagagatgtcttgagaagtagacaaagaaatctacaattcagaatgaacagtaacaagaatgacatgtcctccaaattgagcttgggcagctggatctgaacctatcctacacatctgagtctacagtatgaggtaacagtctccacctatagctatcttctctgcctgtaaggtcattcctttctgaagaaagctgacctcagactattttgcgatcatttaaggaagagcgcaaaatactggagaaggctagtcttcaagctctagatacagaaaatcctcaaattcttgggtgttccctttcagactgagagtcagagccacaagcactgatccaaaaatccccttttccaaaaaaattttccatcttctaccaaggttcacctccctgtttagtgcacactagtatctacagttgttagagcaggagtctctccttatcctctaaggcaggtgttctgtgaagaccccatgacaagggacaaaatgaaacaacatgttcagggacaacaaaggaaaagcccattttatcaatgctccaaaacctggctacctcaggcttggcaagttattcgtgagcagagaagtttgtcatctacatggcagtcatggcctggatgggtctcgaactgtggcatggtaatgctctgagactaggtgccaggagaaagataaattcaatcatccatttctaccaggaagaaaagcaccaggaaggaatcagatgtacagtttgtcctctggggacctctgccttgatcctcaataaatctccttttagatacctcctcttagatgaaattcccacacttcacaatgctctccatggcttctgttggccttatggtcagctctgccaagatctgtattcttgggcaagacagaatccttctgaatctcagtctcttgctctataaatggaaacaattttgctctgcacaaattacaattagcatgtttgtgggaagttaaagtgtgaaactcagcataaatgaaaagtaatgtaccactgttgcttacatgaaaactcttgtaaagttgtcaggcactgtgcaccatctaagcatagcagtgttaggtatgggcccattagtgattagagggggtgcgaggcggagagggggtctccaagcagtgggtctcctggctgtggggaagctggctcagcggccataccaggagctgaaaccgaaggtactctgtgtgtcctctcaacaccatgggccccactttggcattatttccaattccctctggtttccatttgcttcctccctctagccccctggccaggtccgatttcaacaccaagtttctgagcttttcccattttgtccaccgtctctagaacatttctgcttcttttacctttcaaagaatccaaacttgaactctacttactcctgcccatcaccagcctgagctcagagttgctgagaagggaaagcaccctcataaggaagctcctcctttccctacatcattagacttgagcacagacagcatctccatttccacactgctctggccaggttgtgcctcagtcaattacacaactgtgtcttagtagccttggtagggcccaaatcaggatattctctaggaagattcactttgtactgagccaagcataatctcactgcatcgaaaatagaaaatgatcatctgatcattctggttcagactgtcagccctgagcaggtgggtcagtttgcatcacctgagtgcagattgcaaggacaacagtgaggctgcataaaaagaacctatgacaggatgcacatgagagagacaaatgtcttcacattgaagaaggggaggagtgcgccattggttttccatcctccagaggcactgagaaagctcctacagaaactgtgccccctccttctttgaaacacttcccatccttaagccttggtaggaaggagagaaatctggaagcccagaatcctatggaatgctgagtctcccttctccttaccccttagtgttggaattttcattccccaaaatcttgcatttgaccttcctgcacactgactggagagaagcatcttcatattcacaggaatgagccttagataagactttgctcctctcatgtgggccccaggaaactgaaatccaagctttttaccaacgcttgcccttccttaagtacattaaatacattcccaataggtggaaagatttgtaaacagctaggccattctccctccttctaaccctcatctccagggcctaagaaagcccagctctgttatctggggcttgactttccctgtcttccccatcccagtatccttgcaggaaacagccggtctcgctctctgctctcagaaggcaagtttccttatcacctgtgaatcacaaacccagagagtggccaaacatagccaggctgatgcaagaccctgggaagaggaaagctgcaggtgtgtttgtgctgggaggagtggtgaccctcacctcacagtcacctcctctctggatcctcgtgaggtataaagacgagtcctccaccaccagtcaggcacactctaccaccatgaatccactcctgatccttacctttgtggcagctgctcgtgagtatcatgccctgcctcaggccccaaccacccccccgttcctggccgacaaatgcccttccattcttaccacctctcctcttttgactgtgctctgatattccgtttcctccatctggcatatctccttcccatcctccttgggctctttttaagtctcacctgttcaccttctccttgacttcactcccaccactgtcattcatccatatccgagttgtggttggagaagctgggaagggggccaggtggggctgtcccacgaaatgaagcagcaggcttcaggcttggctccgacagcaacagaatagcaccactatagctgctcctaacctcgaatgcacctggggaggttgaaaaattactcatgccagagactcagctctagaaattctaacttcaattgtctggggtagagcttgtgttctgggcttttaagcttcccaggtgatttttaatatttccagccatgcagccaaggttaagaattgctgtcctattggccaataacaaagtctacctttgttctgccaaagtgagcctgggggctgccctcaactctgccctgactgcacagatctgagctatgggggaaggtggtcatggccaggtctatgcagacagggggttttcctagcttggcaaaagaatcctgacaatccagggcccaaatagccaggggaagtacacaggtgatgaataaaagagagaagcactcagtgggagagacaaccacatcccaactcctatcccactggaagcattgtgaggacattccttgcgacttcagcctggtgaccccaggagagctcggatcctccgcagggtacctagctatgtgccctgcaggcacagagacttgggagccacaggcagtgatgatcaccaggggtggcagagctccctcccttgcctagcctcactgtgcttgttaaggatttctaattagcagaaagcaatcacaggctgggagcgccacccctaacatgctattgacttgccttctcccttcccatctccactccagttgctgccccctttgatgatgatgacaagatcgttgggggctacaactgtgaggagaattctgtcccctaccaggtgtccctgaattctggctaccacttctgtggtggctccctcatcaacgaacagtgggtggtatcagcaggccactgctacaagtcgtaagtgtggggcccccgactgcaaagctcccggccagtctgcctgggagagcttggcttcagcccagggaactactgaggttgggtaagatggatgggagaggtggtggagaagaaaacttgttggcagctgcggactctccagagcagagagtgaacacaagacaggaacctctcacacccaggcaaatccatgaaacagcaagggttgtggtcataaaagcaggcagggatgatcttggggtggtgagagctagtgagaaaagcaggcaagtatcttttgctggttagctacacattaaagccaactaagaaagactttttaaaaatacagatgcctttgtcctatcccagggcaattaagtcaaaattttcaggaagagggtgtgaatatcagtgagaattttacactctacctctgctaactgtagagtgtatagacagagctgagaactgctgcctacaccaagaactctcaaacctgagtatgcatcagaacgccctgcaggcttgttaaggcacaaatcactgggccccttccccaaggttctgatcagtaggtgggggtaaggaccaagaattcacatttctaacaagttcccaggagatgctaatgctatggctacccttggattagattacacagaagggtggttctcaccaggccaagaatggagggaggaacaggcactgtgcacagttggcaaaggcctggggtgaagaatgctgggaaaacttcaaggagctccttgtgcccacagtgctagtgactgtggagattgtgggaaagagtctggggaggcaggttgaggagcagcctctggtgggatccctttgactcttccccaccccactaccaccaacctctggagcagataggtcctgggtctcataccttcactgacccacatccctctgctgcccatgcgatatggccacacaccccaccccatgcctccagagctgtccatgagcagagagcttgaggaacctggggaaggtgggataggtgccctggctgtgggagaaggtcttcaccatgcctgccctgcccatcagccgcatccaggtgagactgggagagcacaacatcgaagtcctggaggggaatgagcagttcatcaatgcagccaagatcatccgccacccccaatacgacaggaagactctgaacaatgacatcatgttaatcaagctctcctcacgtgcagtaatcaacgcccgcgtgtccaccatctctctgcccaccgcccctccagccactggcacgaagtgcctcatctctggctggggcaacactgcgagctctggcggtgagtgggacccttagtccttctacttccctccatcctcacaatttccagaacaaaccatgccccttaacttgaatcctctcacctccaggcttaagacacatttcgagtgcccattacacacagactctgcactgggcaccagagagatgcaaactatcaaggacttggctcctaaaatcaagagacaggacaaatggagaacttgatatgatcacatcttgggaggggttcaacaatgatcattctgggaactaaaagccagagtctcttgccaggacttatgttctggagtcctctccaggggctgtgttcctcttcagttttccatccaagattattgtctccttctctggcctgacccacatttctacttcctttgatctcttcctgatcctcacagccgactacccagacgagctgcagtgcctggacgctcctgtgctgagccaggctaagtgtgaagcctcctaccctggaaagattaccagcaacatgttctgtgtgggcttccttgagggaggcaaggattcatgtcaggtgatttgaccaacccttcccatgctgaggctcccactgatacctaggccccaccagggaaaaggatttgaactcaaaaggtggtggggctgaggaggctccctgcagtgcccacatggagaagtgaggaagactcccttgggctgcatcttgtctgcttaggaagaacagagaatgggccaccatgagaaggacatggagccacagagctggctggaaaggggtcttttaaggttcagagtaaatgtagctatattcctcctccatctctccatacaacttgtcccttcttccccccagggtgattctggtggccctgtggtctgcaatggacagctccaaggagttgtctcctggggtgatggctgtgcccagaagaacaagcctggagtctacaccaaggtctacaactatgtgaaatggattaagaacaccatagctgccaacagctaaagcccccagtatctcttcagtctctataccaataaagtgaccctgttctcactgtctgtgtctgtgcctgctccctctcactccttcacactggaaagcatcctccaatttcaggttagacacgactgtcccctttaaaggtaagcagagcccccatctcccaaaatgtgttccatggtacactagattagcacatacaaacagatggaatccaaaaataagaagaagcttgggagaaaggggagtactgttttctagagatacctgtttcagaaaggtggtctttggggtgggggggtgggtattgatttttatttgggcttctcacagtagttagagctactctgccttcagaacaattacagcacagaaaatgtgtcagcatcttcgaggtggcccaaaaaacctgaccagctgaatcttcttgctaaaatacaataataatgacaaatcctgttggtgatgacgtgcctctcccaggaatgtgtcggcaccaaaccctcgaccaagccctcccttctcattcacctggaaaatcagatgcaaataaatctccctggccgcctaactcttccctcagttccctagttccatctctgtgagcaggctagagagatgttccacctaccatagcaggagccagactgcgacttgggaatcaagcccagatctacacgctgggcttgattttcgtcttctttgcctttggggtaggatgccacagtgaatcccacagctaacaccagctcctcactctgaccagggaaagaaactagagagggtcaggattcacctatttgatcaattagctgaggaaggattcattttcataaaacttgcttgactttgagacacttcaagtgagttatttgggattctttaaaaggggtggaaggaaagatctgaggactgtgacaccaccagccactctgaccacacgttggctggcttgaacccactggatgcagcagagggaggcaggccctgtggcacctctggcacctgccaaagcctcctcctggcaattctgagagggcccatgttggggctgtagctcatccaagcttggcaccgaagatccaaggaagcttctctttgaaattccaccttcacctctgtcccaagtggttgtggacacccctgggagctggcactaagggccaggagcagccaagggagacagacaagttcagagcacatttccagttacagggaacagagcacaggcctccaagtgtccacagagcagcgtgcaaattgcagggatgagtagaggaaaacctctacatggagcacagcgttcctggcaaacacaggggactgcagtccacatgctgtggaatacacccaagtatgcatcagacacttgtttggtaaacagtaaatgtgtaagatcaattaccttgagagggccatctgggctccagatgtgtgacttgtgtgaggagacggctaccactcactatctccagaggaaaacagggctcagggctcgcacacaatggatagatacacacgggtcacccagaacatcaatacatacaaacatcactttgttcaacatggattttgtttttatggagtccaaacgcagaccgtagttcaccttacagccttgggtttgtctgcttttggagatatatatccagtagatagatagacagacaagacagataattttttccctttcttactataatgtcaatgccttatctgaatatcatcatcactcaagagtcaagggaagaaccaaacgcttcatataaacagggctgggctgggcagggagtgttagtttccagtgttttctgtctccattcagatcatccctatcaaagcccagctggtcacctcaagccaagacacagacataaggatcccaatggccttccagatggctgcttccacctcccacctgggccactaagactctttacacaggaaagtgagtcaccccagtgagaagggttgccagaagaaacagggcatgaaaatcacagataaccatgggatttcttccaagtggtcagtataaaatataccaacactaccatcaccaaaaacacaaaacaagcaaaaacatgcttattcaaaatcctagacaaaatactgtgtgagagccaggccacggggttgccttttcacaggccacacagctttcccagtccatgtactcacgtggaaccgtgagatgtgaaagtctgcagggcgtgtgctcaggatcgaggctggtactgttcacctatgggtccagaccaaagggcaataaggcagaaagctgatatctgtccaccgccacggcttagggcctccttctcacagaggctcctaagagcccccacctcagccttcacacaaaacatctccttctggctgaactacagccaggctggagtgccgtggcatgatctctgctcactacagtctccacctcctgggttcaagtgattcagcctcccaagtacctgggattacaggcactcgccaccatgcccagctgattttgtttgtttgtttgtttgtatttttagtggagacagggtttcaccatgttggccaggctcattttgaactcctgacctcaagtgatccaaggtactgggattacaggcatgagccaccacttctggcccaggacccattttttaaaaaaattttcaacttttattttagattcagggcatacgtgtgcaggtttgttacatgggtatattgcgtgatgctgaggtttggggcacaaatgttcttaccactcaggcagtgagaatagtgcccaataggtagttattcagccctttccaccctccttctctcttccctctagcagttacagtgtctactgttcctatctttatatccatgtgtaccaaatgctcagctcccacttatacagaagaacgtgatatttggttttacatacctgtgttaatttgcttagaattatggtctccatctccatccacgttgctgcaaagacatgatttcattttttcatagctgcatagtattccatggtgtatatgtaccacatttcctttatccaatctacagctgatggccacctagattgattccatggctttgttattgtgaatagtgctgtgacggacatgcaagagcatgtgtctttttggcagaccaattattttcctttgggtatatgcccagtaaaggaattgctgggtggaaaggtagttctgtttttaattatttcagaaatctccaaactgccttctgcattaatttttccataaactaatcgacagtcaggccaagagtgtataagcattccctttcctctgcagccttgacagcatcttctattttttttttttttttttttgacgttttaataatagccactctgcagccaagctctttcaaggccaatgtgggatagagccacaaacatcccttttccggaagagaattcttgcctgcccactggtagaattcttgttttcatctgtcttttattatttgtttttcaaagaaaaactggcctgtaatcccagcactatacgtggccgaggcgggcggatcacgaagtcaggagatagagaccatcctggctaacacagtgaaatcccgtgtctactaaaaacataaaaaattagccaggtgtggtggcaggtgcctgtagtctcagctactcgggaggctgaggcgggagaatggcgtgaacctgggaggcaaagcttgcagtgacctgagatcatgctactgcactccagcctggacaacagagccagactctgtctcaaaaaaaaaaaagaaagaaaagaaaagaaaaaaaagaaaaaccaaaggtaaagtggtaagatcttccacacctgaaccagtttgtagccaccagagcctgctgcgaaggggcccctcaagcatgcattcatcttgtcacctggaatttgagagatcaagaagccccatagcaacctaccatgcaactgcccatcagtgctgatcctttcaagggattatctcaattctgactctgcagacactggcagccacaggtgacaaaccctgtgtatctgtgggctttcctcatcacccagggccacaatggggtgcctgccctaggcagagacacagcaacattctcttaaactgaaattaagcataaatccacttcaccaataatcatctgagggctcagtccctgtctccttcctcggggattttaaaacacacatttctctgaccaaacaggtaggtgagatctgactttaaaggggggaaattgggttgaattgaggtatcaggaatggatcacaagtgtttttgtgtggggacaggcatccacatccctaactgtacctggagatggagaaaaatgcaggagaggagaagagaaaaaaaggaggaaaaagtggctgaaagtatttgaaagcttctctcatggttctttctggctctggttgcttttccaaggtcttgagtgcaggcagggccagctctggctgggagctgctgctctgggacatggaagagtcacttcacctccagaaagttcattcgatcatctgtaaaatgggcaagcccataggtggttgtgatgataaaatgaaaaaaaaacattcttaacttacatgagttacatgctgtatagtaagttatgtgctatataggaagcacacagaaatgattcactgttatcataatagaaggacagtggcttggtgtgctaagcactaaatacaagccagaaaaaatgtcttagagaagtagacaaagaaatctatagttcagaaccaacagtaccaagaatgacatgtcctccaaattgagcttgggcaggtagatctgaacctatcctacacatctgagtctatgatatgaggtaatagtctccacctatagctatcttctctgcctgtgaggtcattcctttttgaagaaagctgacctcagactatactgtgatcatttaaggaagagcacaaaatactggagaaggctagtcttcaagctctagatacagaaaatcctcatattcttgggtgttccctttcagacagagaatcagagccacaagcactaatccagaaaccccctttcccaaaaacgttttccatctcctaccaaggttcacatccctattgagtgctcactagtgtctatagttgctagagcaagagtctctccttattctctaaggcaggagttctgtgaaggccccatgacaaggggacaaaatgaaacaacatgtttagggacaacacaggaaaaacccatattatcaaagctccaaaacctggctacctcaggcttggccagttattcatgagcagagaggtttctcatctacatggcagtcatggcctggatgggtctggaactgtggcaagataaggctctgagacaaggtgccaggagaaagatgaattcaatcatccatttctgccaggaagaaaagcaccaggaaggaatcagatgtacagtttgtcctctggggacctctgccttgatcctcaataaatctccttttagatgccacgtgcagcaattcccacactttacaatgctctccatggcttctgttggccttatggtcagctctgccaagatctgtattcttgggcaagacagaatccttctgaatctcagtctcttcctctataaatggaaacaatttggctctacacaaatcacaattagcatgtttgtgggaagttaaaccgtgaaactcagcatcaatgaaaagcaatgtaccactgttgcttatgaaaactcttgtaaagttgtcaggcaccatgcaccatctaagtacagcagtgttaggtataagcccatcagtgattagagggggtatggggtggagagggggtctctgagcagtgggtctccgggctctggggaagctggctgggtggccatactaggagctgaacccgaaggtactctgtgtgtcctctcaactccacgggccccactttggcattttctccaattccctctcgtttccatttgcttcctccctctagccccctggctgtgtccaatttcaacaccaagtttctgagcttttctcattttgttcactgtctccagaacatccctgcttcttttacctttcaaagaattcaaacttgaactctgctcactcctgcccatcaccaacctgagctcagagttcctgagaagggaaagcaccctcataaggaaactcctccttttcttacatcattagacttgagcacagacagcatttccatctccacactgctctggccaggttgtgcctcagtcaattacacaactgtgtctcagtagccttggtagggcccaaatcaggatattctttgggaagtttcactttgtactgagccaagcataatctcccgggatctaaaatagaaaattctagacccacccctccacatcttcgttattgaacccaatatgtcacccatttaccatgtgctcaaatctctacctactgctgattctcagatcaaatcgtaacccagatttaccatggtccaaactctgacatctgattggggccatgtcatcctggttcaggctgtcagccccaagcaggtgggtcagtttgcctcaccctgagagcaggttgccagggcaaccatgaggctgcataaaaagaacctatgacaggatgcatatgagagagacaaatgtcttcacattgaagaaggggaggagtgcaccattggttttccatcctccagatgcactaagcttctacctaaactgtgccccctccttctttgaaacacatcccatccttaagccttggtaggaaggagagccatctggaagccctgaatcctatggaatgctgagtctcccttctccttcccccttagtgttggaattctcattccccaaagtcttggatttgacctttcccgacactgactggagagaagcatcttcatattcacaggaatgagccttagatcagactttgctcctctcctgggagctccaggacactgaaaagccaagcttgttaccaatacttgcccttccttaagtacattaaatacatcccaaatagttaaacagattcctaaacagccaggccattctccctccttctaaccctcatctcctcggcctacgaaagcccagatgtgtgatccagggcttggcttcccctgtcttccccatcccagcatccttgcgggaaagggctgctctctctctctgctttcagaaggcaaatttccttatcacctatgagtcacaaacccagagagtggccaaacatagccaagctgatgcaagaccctgggaaggggaaagctgcaggtgtgtttgtgctgggaggagtgctgaccctcacctcagagacacctcctctccagatcctcaggaggtataaagacaggtcctccaccaccagtcaggcacactctaccaccatgaatccactcctgatccttgcctttgtgggagctgatggcgagtttcatgccatgcctcaggccccaaccaccccctttcctggcagacacttgccctgccattcttgccacctttcccattttgactgtgttctgatattctatttcctccatctctccttcccatcctcttcggctctctttaagcctcacctgtttcagcttctccatgatttcactcccaccactgtcattcatccatatctgagctgtggctggagaagctgggaagggagaccaggtggggcgggcccacaaaatgaagcagcagccttcaggcttggctccatagcaccagtatagcaccattatatctgctcttaacctcaaatgcacctggggaggttgaaaaattactcatatcagagactcagctttagaagttctaacttcattctctggggtgcaacctgtgtactgggcttttaacattcccgggtgatttttaacatttccatgcatgcagccaaggttaagaattgctgttctattggccaataacaatgtctacctttgttctgccaaagtgagcctgggggctgccctcaactctgccctgactacacaaatctgagctatgggggaagctggtcatggccaggtctacgcagccagggggttttcctagcttggccaaagtatactgacaatccagggctcaaatcgccaggggaagtacacaggtgatgaataaaagagagaagcactcagtgggtgagacaaccacatcccaattcctatcccactggaagcattgtgaggacattccttgaatcctcagcctggtgaccccggggagaactgagcccctgcagggtacctagctacatgccctgcagacacagagacttgggagccacatgcagtgatgcttaccaggggtgacagcgctccctcccttacccagcctcactgtgctcgttaaggatttctaattagcaggaagcaaccgaaggctgggagcgctacccctaacatgctactgacttgccttctcctttcccatctccactccagttgcttcccctttcgacgacgatgacaacatcatttagtggtatacctgtgaggagaattctgtcccctaccaggtgtccctgaattctgggtaccacttctgcagtggctccctcctcagcgaacagtgggtggtgtcagcagctcactgctacaagtagtaagtgtggggcccctgactgcaaagctcccagccaggctgcctgggagagcttggcttcagcccagggaactactgaggttgggtaagatggatgggagaggtggtggagaagaaaacttgttggcagcagcggactctccagagcagagagcgaacacaagacaggaagctctcacacccaggcaaatccatgaaacagcaagggttgtggtcataaaagcaggcagggatgatcttggtgtttggcagagctagtaagaacagcaggcaagtaccctttgctggttagctacacatcaaagtcacttaagaaagagtttttaaaagtactgatgcctgtgtcctatcccagggcaattatcaggaattttcaggaagagggtgtgaatatcagtgagtattaaacattctacctctggtaactgtagattgtatagacagagctgagaactgctccctacaccaagaactctcaaacctgagtttgcctcagaaccacctgcagggttgttaaagcacaaatcactgggacccatccccaaggttctgagcagtaggtgggggtaaggaccaagaatttacatttctaacaagttcccaggagatgctaatgctatggctacccttaggttagattacacagaagggtggtgctcaccaggccaagaaaggagggaggaacaggcactgtgcacagttagcaaaggcctggggtgaagaatgctgggaaaacttcaaagagctccttgtgcccacagtgctagtgactgtggagattgtgggaaagaggctgggaaggagggttaaggagcatcctccggtggaatccttttgactcttcccaaccccattaccaccaacctctgaaacagaaaggtcctgggtctcacaacttcactgacccccatccctctcctgcccatgtgatatggccacacaccccacccgatgcctccagagctgcccatgagcagggagcttgaggaccctggggaaagtaagatgggtgtcccagctgtgggagaaggtcttcaccatgcctgccctgcccatcagccgcatccaggtgagactgggagagcacaacatcgaagttctggaggggaatgagcagttcatcaatgcagccaagatcatccgccaccccaaatacaacagttggactctggacaatgacatcctgctgatcaagctctccatgcctgctgtcatcaatgcccacatgtccaccatctctctacccaccgcccctccagctgctggcaccaagttcctcatctctggctagggcaacactctgagctctggtggtgagtgggaccctttgtccttctccttccctccatcctcacaatttccagaacaaaccatgccccttaacttgaatcctctcacctccaggcttaagacacatttctagtgcccattacacacaggctgtacagtggatggacatcagagagatgcaaagtctcaaggacttggctcctaaaatcaaaagacaggacatatagagaacttgctttgatcacgtcttggaaggggttcaaaaatgatcattctgggaactaaaagccagagtcccttgccaggacttaggtttcggagtcctctccagggacagtgttcctcttcaatgttccatcctagattattgtctccttctctggcctgatctacacttctactttctttgttctcttgctgatcctcacagccaactatccagatgagctgcagtgcctggacactcatgtgctgacccaggctgactgtgaagcctcctaccctggagagattaccaacaacatgttctgtgtgggtttccttgagggaggcaaggattcctgccaggtggtttgaccccttcccatgctgaggttcccactgatacccaggccccacccaggaaaaagatttgaactcccaaggtggcggggctcaggaggctccctgcactgcccccatggagaagtgaggaagactcccttgggctgcatcctgtctgcttaggaagaacagagaatgggccactgtgcgaaggacgtggagccaaagagctggctggaaaggagtcttttaaggttcagagcaaatgtagctatattcttcctctttctctctcttcatacagcttgtcccttcttctccccagggtgactctggtggccctgtggtctgcaacggacagctccaaggagttgtctcctggggctatggctgtgcccagaagaacaggcctggagtctacaccaaggtctacaactatgtggactggattaaggacaccatagctgccaacagctaaagcctctggtacctctgcagtctctataccaataaagtgaccttgctttcactgtctgtgtctgtgcctgctccctcacactgcttcacactggaaagcatcctccaatctcaggtcagccacgactcccccccttaaaggtaagctgaaccctcatctcccaaaatgtgttgcatggtacactagattagcacatacaaatagatggaatccaaaaattataagaaacttgggagaaaggggggcactgttttctagagaaatgtgtgtttcagaaagttggtctttggtgggggggtactgatttttatttgggcttctcacagtgggtagagctactctgccttcagaacaatcacagcacagaaaatgttgtcagcatcttcgaggcagcccaaaaaatccgaccagctgaatcttcttgctaaaatacatcaaaaaagacaaatgctgttggtgatgacgtgcctctcacaggaatatgtcagcaccaaaccctcaaccaagccctccctcctcattcacctggaaaattagactcaagcaaagctccctggcctcctacctcttccctcagttccctagttccatctctgtgagcaggctagagagatgttccacctaccatagcgggagctagactgcgacttgggaatcaagccaggtctgcacgctgcattttcatcttctttgcctttggggtaggacgccatatgaatcccacagttaacaccagctccccactctgaccagggaaagaaactagagagggtcaagattcacccatttgatcaattaactgaggtaggtttcattttcatataacttgcttgcctttgagatacttcaagtgacttacgtgggactccttaaaaaaaagtggagggaaagacatctgagcagccactctggccacatgttggctggcttgcacccactggatgcagcagagggaggcaggccccctggcacctctggcacctgccaaagcctcttccaggcaattctgagagggaccatgttggggctgtagctcatccaagcttgtcactgaagatccaagcaagcttctctttgaaattccaccttcatcttctgtcccaagtggttgtggacacccctgggagctggtaacaagggccaggagcagccaaggaagacagacaagttcagagcacatttccagttacagggaacagagcacaggcctccaagtgtccacagagcagtgtgcaaattgcagggatgagtagaggaaaacctctacatggagcacagcattcctggcaaacacaagggaccgcagtccacatgctgtggaataaacccaagtatgcatcggacacttgtttggtaaacagtaaatgtgtaagatcaattaccttgagagggccatctgggctccagatatgtagttcatgtgaggagacggctaccactcactatcttcagaggaaaacagggctcagggcttgcacacaatggagatacacacaggtcacccagaacgtcaatacatacaaacatcactttgttcaacatggattttgtttttatggagtccaaacgcagaccgtagttcaccttacagccttgggtttgtctgcttttggagacatatatccagtagatagatagacaacacagatacatttttttccctttcttactgtaacgtcagtgcctcgtctgaatatcatcatcactcaagaatcaagggaagaacaaaatgcttcatataaacagggctgggcaaggagtcttagtttcccctgttttctgtctccattcagatcattcctatcaaagcccagctggttacctcaagccaagagacagacataaggatcccaatggccttctagatggctgcttccacctcctacctgggccacatagagtctttacacagaaatctgagttagccctgtgagaagggttgacagcacaaacagtgcatgaaaatcacagataaccatggtatatctcgcaagtggtcagtgtaaaataaaccaccaccaccaccacaaaaaacacaaaacaagcagaaaaatgcttattcaaaaatctaagacaaaatactgtgtgagaaacaggccacggggttgccttttctcaggccacacagctttcccattccatgtgctcacatggaccgtgagatgtgaaagtctgcagggcgtgtgctcgggatcgaggctggtactgttcacctgtgggtccagaccaaatggcaaagaggcagaaagctataactctgtccaccgccacggcttagggcctccttctcacagaggctccaaagagcccccacctcagccttcacacaaaacatctccttctggctgaacaacagccaggctggagtgccgtggcatgatctctgctcactacaacctccacctcccgggttcaagtgattcagtctcccaagtacacgggattacaggtgcatgccaccatgccaagctaattttttttttcttttttgtatttttattagagacagggatttacgatgttggccagtgtggttttgaactcctgacctcaagtgatccagagtgctaggattacaggtgtgagccacagcttctggcccaggccccattttttaaaaaataatttcaaattttattttagattcatggggtacatgtgcaggtttgttacatgggtatactgtgtgatgctgaggtttggggcacaaatgatctcctcactcaggaactgagcacagtacccaataggtattttttcagccctttccacactccttctctcttccctctagtagttgcagtgtctactcttcccatctttacatccgtttttacccaatgctcagctccgacttatacatgagaacgtgatatttggttttctgttcccatgttaatttgcttaggattatggtctccagctccatccatgttgctgcaaaggacatgatttcattcttttcatggctgcatagtattccatggtgtatatgtaccacattttctttatccagtctaccgctgatggccacctaggttgattccatggctttgctactgtgaatagtgctgtgatggacatgcaagagcatgagtctttttggcagaacaattactttcctttaggtaaatgcccaataaagcaagtgctgggtggaaagatagttctgttttaaattgtttcagaaatctccaaacggttttctacattaatttttccatgaactgatttacactctggccaacagtgtacaagcattccctttccactgcagcctcatgagcatcttctattctgtggacattttaataataaccacactgcagccaagctctttcaagcccaatgtggggaacagccacaaacatcccttttcccaacgagaattcttgcctgcccactggtagaattcttgttttcagctgtctttcattgtttgcttttcaaagaaaaaccaaaggtaaagtggtatgatcttccacacgtgaaccagtttgtagccaccagagcctgctgggaaggggcccctcacgcatgcattgatcttgtcatgtggaatttgagagatctagaagccccacagcaacctaccatacaactgcctatcagcgctcatcctttcacaggattagctcaattctggctctgcagacactggcagccacgggtgagaaaccctgggcctctgtgggcttccttcatcacccagggccacagtgggctgcctgtcctaggcagagacacagcaacattctcttaagctgaaattaagcataaacccacttcaccaataatcatctgagggcacagtccctgcctccttccttggggattttaaaacacacatctctctgaccaaacaggtaggtgagatctgactttaaaggggggaaagtgggatgaattggggtatcaggaatgaatcccaagtgtttttgtgtggcgaatggcatccacatcccaaaatatacttggagatggggaaaaaagcaggagaggagaagggtaaaaaaggaggacaaagtgtctgaaagtcattgaaagcttctctcatggttctttctggctctggttgctttgccaaggtcttgagtgcaggcagggctggctctggctgggagctgctgctctggaacatggaagagtcacttcacctccagaaagctcatttgatcatctgtaaaatgggcaagcccataggtggttgtgatgacaaaatgaaaaaaactttcttaacttacatgagtgacatgctgtatagtaagttacatgctatataggaagcacacagaaataattcactgttatcataaatgaaacacagtggattagtgagctaagcactaaatggaagccagaaagatgtctagagaagtagacaaagaaatctatagttcagaatgaacagtatcaagaatgacatgtcctccaaattgagcttgggcagctggatctgaacctatcctacacatctgagtctacagtatgaggtaacagcctccacctatagctatcttctctgcctgtaaggtcattcccttttgaagaaagctgacctcagactatactgtgattgtttaaggaagagcgcaaaatactggagaaggctagtcttcaagctctagatacagaaaatccttatattcttgggtgttccctttcagacagagtcagagccacaaccgctaatccaaaaatcccattttccaaaaaaattttccatcttccaccaaggttcccctccctgtttagtgcacactggtgtctacagttgctagagcaagagtctctccttatgctttaagcaggagttctgtgaagaaaccatgccaaggggacaaaacaaaacaacatatttagggacaacacaggaaaaacccatattatcaaaactccaaaacctggctacctcaggcttggccagttatctgtgagcagagagttgtgtcatctacatagctatcatggcccagacggtctggaaatgtggcaaggtaaggctctgagacaaggtgccaggagaaagatgaattcaatcatccatttctgccaggaagaaaagcaccaggaaggaatcagatgtacagtttgtcctctggggacctctgccttgatcctcaataagtctccttttagatgccacctgcagcaattcccacacttcacatgctctccatggcttccattggccttatggtcagctctgccaagatctgtattcttgggcaagacagaatccttctgaatctcactctcttgctctataaatggaaacaattttgctctgcacaaatcacaattagaatatttgtgggaagttaaagtgtgaaacacagcataaatgaaaagcaatgtaccactgctgcttacatgaaaactcctgtaaagctgtcaggcaccatgaaccatctaaatatagcagtgttaggtataagcccatcagtgattagagggggtacggggtggagagggggtctcctagcagtgggcctcctcgctgtggggaagctggctcggccaccatgccaagagctgaacccgaaggtactctgtgtgtcctctcaactccacgggccccactttggcattttctccaattccctctggtttccatttgcttcatccctctagccccctgaccatgtccaatttcaacaccaaatttctgagcttttctcatgttgttcactgtctccagaacatccctgcttcttgtacgtttcaaagaattcacacttgaactctgctcactcctgcccatcaccaacctgagctcagagttcctgagaagggaaagcacccttataaggaagctcctccttttcttacatcattagacttgagcgcagacagcgtctccatctccacactgctctggccaggttgtgcctcagtcaattacacaactgtgtcttagtagccttggtagggcccaaatcaggatattctctgggaagattcactttgtactgagccaagcataatctcactgcatcaaaaatagaaaattctagaccaacccctccacatcttcgttattgaacccaatatgtcacccatttaccatgtgctcaaatctctacctactgctgattctcagatcaaatcgtaacccagatttaccatggtccaaactctgacatctgattggggccatgtcattctggttcaggctgtcagccccaagcaggagggtcagtttgcatcaccccgagtgcaggtttcaaggacaaccctgaggctgcatgaaaagaacctacgacaggttgcatatgagagagacaaatgtcttcacattgaagaagggaaggagtgggccattggttttacatcctccagatgcactgagtaagctcctacctaacctgtgccccctccttctttgaaacacatccccatccttaagccttggtaggaaggagagccatctggaagccctgaatcctatggaatgctgagtctctcttctccttaccccttagtgttggaattcttgttcccctaagacttggatttgaccttcccgctgagtgactggagagaagcatcttcatattcacaggaatgagccttagataaaactttgcacatctcatgggggctgcagaacactgaaaagccaagcttgttaccaatacttgcccttccttaagtatattaaatacaatcccaatagttaaacagattcctaaacagccaggccattctccctccttctaaccctcatctcctgggcctaagaaagcccagctgtgtgatccggggcttggcttcccctgtcctccccatcctagcatccttgcaggaaagagccgctctccctctctgctctcagaaggcaagtttccttatcacctgtgaatcacaaacccagagagtggccaaacatagccgagctgatgcaagaacatgggaagcagaaagctgcaggtgtgtttgtgctgggaggaatggtgaccctcacctcacagacacctcctctctggatcctccagagctataaagacgggccttccaccaccagacaggcgcactctaccaccatgaatccactcctgatccttgcctttgtgggagctgctggtgagtttcatgccctgcctcaggccccaaccaccccccgttactggcagacatatgccctgccgttcttgccacctctcctcttttgactgttctctgatattctgtttcctccatctggcatatctccttcccatcctccttgggctctctttaagcctcacctcttttaccttctccctgatttcattcccaccactgtcattcacccatatttgagctgtagctggagaagctggaaatggagaccaggtggggcaggtccacaaaataaagcagcaggcttcaggcttggctccaacagcaccagaatagcaccactatagctgctcttaaccttggatgcacctggggaggttgaaaaatttctcatgcgagagactcagctctagaaattctaacttcatttctctgggatgcagcctgtgtactggctttttaagcttctcaggtgatttgtaacatttccaggcatgcagccaagattaagaattgctgtcctattggctaataacaatgtctaccattctctgctgaagtgagcctaggggctgccctcaactctgccctgactacacaaatctgagctatgggggaagctggtcatgacgaggtctatgcaactagggggttttcctagcttggccaaagtatcctgataatccagggctcaaataggcagaagaagtacacaggtgatgaataaaaaagagaagcattcagtaggtgagaaaaccacatcccatctcctatcctacaggaagcattttgaggacattccttatgacctcagcctggtgaccccaggagagatctgaaaccccatggggtacctagctacgtgccctggagacacaaagacgtgggagtcacatccagtgatgctcacaggggtggcagagctccctcccttgcctagcctcactgtgcttgttaaggatttctaattagcaggaagcaaacgcaggctgggagtgccacccctaacatgctactgacttgccttctcccttcccatctccactccagttgctgtcccctttgatgatgatgacaagattgttgggggctacacctgtgaggagaattctgtcccctaccaggtgtccttgaattctggctcccacttctgtggtggctccctcatcagcgaacagtgggtggtgtcagcaggtcactgctacaagccgtaagtgtggtgccactgactgcaaagctcccagccaggctgcctcggagagcttggcttcagcccagggaagtactgaggttgggtaagatggatgggagaggtggtggagaaaaaacttgttttcagcagctgactctccagagcagagagtgaacacaagacaggaagctctcacacacaggcaaatccatgaaacagcaagggttgtggtcataaaagcaggcagggatgatcttggggtggtgagagctagtgaaaaaagcaggaaagtacctttagctagttagctacaccttaaagccacctaagaaagagtttttaaaaatactgatgcctgtgtcctatcccagggcaattatcaggaattttcaggaagagggtgtgaatatcaatgagtatttcacactctaccttggtaactgtagagtgtattgacagagctgataaccactgcctacacgaagaaccctcatacctgagtatgcaccaccagaaaaaactgcaggcttgttaaggacaaatcactgggtcccatccccaaggttctgatcagtaggtgggggtaaagaccaagaatttacatttctaacaagttcccaggagatgctaatgctatggctacccttggattagattacacagaagggtggtgctcaccaggccaagaatgcagggaggagcaggcactgtgcacagttagcaaaggcctggggtgaagaatgctgggaaaacttcaaggacctccttgtgcccacaggactagtgactgtaaagattgtgtgaaagaggctgggaaggtgggttgaggagcagcctccagtgggatccctttgactgttccccaccccattaccaccaacctctgaagcagaaaggtcctgggtctcacacctgcactgacccacatccctatcctgcccatgtgatatgaccacgtacccaaccccatgcctccagagctgcccatgagcaggaagcttgaggaccctcgggaaggtgggatgggtgccccagctgtgaaagaagggcttcaccatgcctgccttgcccatcagccacatccaggtgagactgggagagcacaatatcgaagtcctggaggggaatgagcagttcatcaatgcagccaagatcatccgccaccccaaatacaacaggattactctgaacaatgacatcatgctgatcaagctctccacacctgccgtcatcaatgcccatgtgtccacgatctctctgcccactgcccctccagctgctggcaccgagtgccttatctccggctggggcaataccctgagctcagggggtgagtggcaccctttgtccttctacttccctccatcctcacaatttccacaatgaagcatgctccttaacttaaatcctctcacctccaggacacatttctagtgcccattacacacaggttctgcactgggcaccagagagatgcaaagtctcaaggacttggctcctaaaatcaagagacaggacaaatggagaacttggtgccattacttcttgggaggggttcaacaatgatcattctaggaactaaaagccagattcccttgccaggacttgttttggagtcctctccaggggcagtgttcctcttcaatgttccatcctagattactgtctccttctctggcctgacccacatttctactttctttattctcttcctgatcctcacagccgactacccagatgagctgcagtgcctggacgctcctgtgctgacccaggctaagtgtaaagcctcctaccctttaaagattaccagcaagatgttctgtgtgggcttccttgagggaggcaaggattcctgccaggtgattagaccaacccttcccatgctgatgttcccactgatacccaggacccaccagggaaaaagatttgaactcccaaggtggggggctgaggaggctccctgcagtgcccacatggagaagtgaggaaggctcccttgggctgcatcctgtatgcttaggaagaacagagaatgggccaccgtgagaagaacatggagccacagagctggctggaaaggggtcttttaaggttcagagtaactgtagctatattcctcctccatctctccataaaacttgtcccttcttcatgccagggtgactctggtggccctgtggtctgcaatggacagcttcaaggaattgtctcctggggctatggctgtgcccagaagagaaggcctggagtctacaccaaggtctacaactatgtggactggattaaggacaccatagctgccaacagctaaagcccctggtcactctgcagtctctataccaataaaataaccctgttctcactgtctgtgtctgtgcctgctctctcacactccttcacactggaaagcatcctccaatctcagttcagatatgactctcccccttaaaggtaagcagagcccccagctcacaaaatgtgttccattgtacactagattagcgcatacaaacagatggaatccaaaaataagaagcagcttcggagaaaggcagggcactgtttctagagaaacgtgtgtttcagaaaggtagtctttgggggagggtattgatttttatttgggtttctcacagtggttagagctactctgccttcagaacaatcacagcatagaaaatatgtcagcatcgtccaggtggcccaaaaaatctgaccagcggaatcttattgctaaaacacaataatgacaaatgctgttggtgatgtcatgcctctcccaggaatgtgtcagcaccaaaccctcaaccaagccctcccttctcattcacctggaaaatcagattcaagtaaatctccctggcacgctgactcttccctcaattccttagttccatctctgtgagccggctagagagatgttccacctaccatagcgggagccagactgtgacttgggaatcaagcccagctctgcacgctgcactttcatcttctttgcctttggggtaggacaccacagtgaatcccacaattaacaccagctccccagtctgaccagggaaagaaattagagagggtcaggattcacccatttgatcaattaactgaggaaggattcattttcataaattttgcttgcctttaagacacttcaagtgagttatttgggactcattaaaaagggtggaaggaaagacatctgagggctgtgacaccatgcagccactctagccacatgttggctggcttgcacacactggacacagcagagggaggcaggccccgtggtacttgtggcacctgcaaaagcctcctcctggaaattcggagagggcccagcttggtgccgtaactcatccaagcctgtcaccgaagatccaagcaagcttctctttgaaattccactttcaccttctgtcccaagtggttgtggacacccctgggagctggtactaatggccaggagcagccaaggaagacagacaagttcagagcacatttccagttacggggaacagagcacaggcctccaagtgtccatggagcagcgtgcaaattgcagtgatgagtagagtaaaacctctacacggagcacagcattcctggcaaacacaggggaccgctgtccacatgttgtggaatacacccaagtatgcatcagacacttgtttggtaaacagtaaatgtgtaagatcaattgccttgagagggccatccgggctccagaagtgtgattcgtgtgaggaaacagctaccactcactatcttcagaggaaaacagggctcagggctcacacacaatggacagatacaaacaggtcacccagaacgtcactgcatataaacagcactttgttcaacatggattttgtttttatggagtccaaacacagaccgtagttcaccttacagccttgggtttgtctgctttgggagatacatatccagttgatagacaagacagatacatttttttccctttcttaccataatgtcaatgcctcatctgaatatcatcatcactcaagagtcaagggaagaaccaaacacttcatataaacagagctgggctgggtggggagtgttagtttccagtgttttctgtctccattcagatcattcctatcaaagcccagctgattacctcaagccaagacacagacataaggatcccaatggccttccagatagctgcttccacctcctacctgggccacatagagtctttacacaggaaagtgagtcaccccactgagaagggttgccagcagaaacagggcatgaaaatcacagataacaatgggaatccttccaagtggtcagtgtaaaatagatcaccaccaccaccaccaaaaatgcaaaagaagcaaaaaaaatgcttattcaaaatccaagacaaaatactgtgtgagagtcaggccacggggttgccttttctcaggccacacagctttcccagtccatttgctcacatggaaccatgagatgtgaaagtctgcagagcgtatgctcaggatcgaggcttgtactgttcacctatgggtccagaccaaagggcaaagaggcagaaagctgatatctgtccaccgccaaggcttagggcctccttctcacagaggatctgaagagaacccacctcagcattcacacaaaacatcttctggctcaactacagccaggctggagtgccatggcatgatctctgctcactacagtctctgcctcccaggtcaagggattcagcctcccaagtacttgggattacaggtgcatgccaccatacccagctaatttttttttttttgtatttttattagagacagggattcaccgttttggccagactggttttgaacacctgacctcaagtgatccaaagtactgggattacaggcgtgaaccacctcttctgtccgaggccacattttttaaaaaataatttcaaattttattttagattcagggaggacatgtgcaggtttgttacactggtatattgtgtgatgctgaggtttggggcacaaatgatctcatcactcaagcagtgaccatagtacccaataggtagtttttcagcactttccacactccttctctcttccctctaacacttgcagtgtctactgttcccatctttatatccatgtgtacccaatgctcagctgccagtatacatgagaatgtgatatttggttttctgttcctatgttaattcgcttaggattgtggtctccaactccatccatgttgctgtaaaggacatgatttcattcttttcatggctacatagtattcaatggtgtatatgtaccacatttccttcatccagtctaccgctgatggccacctatgttgattccatggctttgctagtgtgaatcagtgctgtgatggacatgcaaaagcatgtgtctttttggcagaacaattattttcctttgggtaaatgcccagtaaagtaagtgctgggtggaaaggtatttctgttttaaattatttcaaaaatctccaaaatgcttcctgcattaatttttccatgaactcatttacactctggccaacagtgtataagcgttccctttcctctgcagcctcaccagcatcttccattttttggacattttaatagccactatgcagccaagctctttcaaggccaatgtggggaagagccacaaaaatcccttttcccaaagagaattattgcctgctccctggtagaattcttgttttcaactgtctttcattgtttgtttttcaaagaaaaaccaaaggtaaagtggtatgatcttccaaacctgaaccagtttgtagccaccagagcctgctgggaaggggctcctcaagcatgcattgatcttgtcacctgcaatttgagagatcaagaagccccatagcaacctacaactgcccatcagtgctcatcctttcaggggattagctcaattctcgctcagtagacactggcatccacaggtgataaaagcccgagcctctgtgggcttctctcatcatccagggccacaatgggctgcctgtcctaggcagagacacagcaactttcccttaaactgaaattaagcataaacccacttcaccaataatcatctgagggcatagtccctgtttccttcctcagggatttaaaacacacatctctctgaccaaacaggtaggtgagatctgactctaaaggggggaaaatcagcatgaattggggtatcaggaatgaatcccaagtgtttttgtgtggggacaggcatccacatcccgaactgtacctggagatggaaaaaaatgcaggagaggagaagagaaagaaagggggaaaaagtggctgaaagtcattgcaagcttctcttgtggttctttctggctctggttgctttgccaaggtcttgagtgcaggcagggctggctctggctgggagctgctgctctgggagatggaagagtcacttcacctccagatagctcattcgatcatctgtaaattgggcaagcccataggtggttgtgatgataaaatggaaaaaaaaatgcttagcttatatgagttacatgctgtatggtaagttacatgctatatagtaagcacacagaaatgattcactgttatcataattgaaggatagtggttcagtgtgctaagcactaaacacaagccagaaagatgtctgagagaagtagacaaagaaacctatagttcagaatgaacagtaccaagaatggcatgtcctccaaattgagcttgggcagctagatctgcacctatcctacacatctgagtctacagtatgaggtaacagtctccacctatagctatcttctctgcctgtaaggtcattcctttagaagaaagctgacctcagactatactgtgatcatttaaggaagagcgcaaaatactggagaaggctagtcttcaagctctagatacagaaaatccttatattcttgggtgttccctctcagacagagagtcagagccacaagcactgacccaaaaatcccttttttcaaaaaaattttccacttctaccaaggttcacctcgctgtttagtgcacactggtgtctacagttgctagagcaagaggctctcatcctctaaggtctgtgaagaccccatgacaaggggacaaaatgaaacaacatgttcagcggcaacacaggaaaaacccatattatcaatgctcaaaaacctggccacctcaggcttagccagttattcgtgagcagagaggtgtgtcatctacatggcagtcatggcctggatgggtctggaactgtggcaaggtaaggctctgagacaagatgccaggagaaagatgaattcaatcatctatttctgccaggaagaaaagcaccaggaaggaatcagatgtacagtttgtcctctggggacctctgccttgatcctcaataaatctccttttagatgccacgtgcagcaattcccacatttcacaatgctctccatggcttccactggccttatggtcagctctgccaagatctgtattcttgggcaagacagaatccttctgaaactcagtctcttcctctacaaatggaaataattttgctctacacaaatcacaattagcatgtttgtgggaatttaaactgtgaaactcaacataaatgaaaagcaatataccactgttgcttacgtgaaaactcttgtaaagctgtcaggcaccatgcaccatatgagtacagcaatgttaggtataagcccatcagtgattagatgggatacagggtggagagggggtctctgagcagtgcgtctcctggctgtggggaagctggctcagcggctatgccaggagctgaacctgaaggtaatctgtgtgtcttctcaactccacgggtcccactttggtattttttccaattcactctagtttccatttgcttcctccctctagccccctgcacatgtccaatttcaccatttctcattttgttcactgtctccaaggtcggtcagtttcaatcaccctgagtgcaggttgcaagggcaaccgtgaggctgcataaaaagaacctatgacagaatgcacatgagagagacaaatatcttcacattgaagaaggggaggagtgcaccattggttttccatcctccagatgcactgagtaagttcctacctaaccagtgccccctccttctttgaaacacttcccatcctcaagccttggtaggaaggagagccatctggaagcccagaatcctatgggatgctgagtctcccttctccttacccctcagtgttggaattcttgttgtccataggcttggatttaaccttccgcacggtgactggagagaagcatcttcatattcacaagaatgagccttagataagaccttcctcctctcatgggggctgcaggtcactgaaaagccaagcttgttaccaatgcttgcccttccttaagtacattaaatgcatccccaatagtaaaatatattcctaaacagccaggccattctccctccttctaaccctcttctcttcggcctaagaaagcccagctgtgtgatctgcggcttgacttcccctgtctttcccatcccagaatccttccaggaaacagccggtctccctctctgctctcagaaggcaagtttccttatcacctgtctgctctcagaaggcaagtttccttatcacctgtgaatcacaaacccacagagtggccaaacatactgatgcaagaccataggaaggggaaagctgcaggtgtgtttgtgctgggaggagtggtgaccctcacctcacagacacctcctctcccgatcctcgggagataaaaagacgggtcctccaccaccagtcaggcacactctaccaccatgaatccactcccgatccttgcctctgtgggagctgctggtaggagtttcatgccctgcctcaggctccaaccataccccgttcctggcagatgcatgccctgccattcttgccacctctcctcttttgactgttctctgatattctatttcctccatctggcatctctccttcccaccctccttgggctgtctttaagcctcacctgtttcagcttctccctgatttcactcccaccactgtcattcatccctatccgagctgtggttggagaagctgggaaaggagaccaggtggggcaggcccacgaaatgaagcagcaggcttcaggcttggctctgacagcaccacaatagcaccactatagctgctcttaacctcgaatgcacctgaggaggctgaaaaattactcatgccagagactcaactctagaaattctcacttcatttgtctgaggtgcagcctctgttctgggcttttaagcttcccaggtgatttttaacatttctaggcatgcagccaaggttaaaaattgctgttgttttggccaataataatgtctacctttgttctgccgaagtgagccttgggctgccctcaactctgctgtcactgcaaagatctgagctaagggggaaactggtcatggccaggttttcctagccagacagggggttttcctagcttggccaaagtatcctgacaatccagggctcaaatcgccaggagaagtacacaggtgatgaataaaagagagaagcattcagtgggtgagacagccacattccaattcctatcccactggaagcattttgaggacattccttatggcctcagcctggtgaccccaggagagatctgaacccccacagggtacctagctacgtgccctgcagacacagagacttgggagccacatccagtgatgctcaccaggggtggcagagctcccccaccttgcctagcctcactgtgcttgttaagttttctaattagcaggaagcaaccgcaggctgggagagccacccctaacatgctactgacttgccttctcccttcccatctccactccagttggtgtctcctttgatgatgatgacaagattgttgggggctacaactgtgaggagaattctgtcccctaccaggtgtccctgaattctggctaccacttctgtgttggctccctcaacagggaatagtgggtggtgtcagcagctcactgctacaagtcataagtgtggggcccctgactgcaaaactcccagccaggctgccggggagagcttggcttcagcccagggaagtactgaggttgggtaagatggatgggaaaggtggtggagaagaaatcttgttggcagcagctgactctccagagcagagaatgaacacaagacaggaacctctcacacccaggcaaatccatgaaacagtaagggttgtggtcataaaagcaggcagggatgatctcggggtggtgagagctagtgagaaaagcaggaaagtacattttgctggttagctacacactaaagccacgtaagaaagcgtttttaaaagtactgttgcctgtgtcctatcccagggcaattatcaggaattttcaggaagagggtgtgaatatcagtgggtatttcacactctacctctggtaactgtagagtgtatagacagagctgagaaccgctgcctacaccaagaactctcaaacctgagtatgcatcagaactccctgcaggcttgttaaggcacaaatcactgggtcctatccccaagtttctgatcagtaggttggggtaaggaccaagaattcacatttctaacaagttcccaggagatgctaatgctatggctacccttggattagattacacagaaaggtggttctcaccaggccaagaagggagggaggaacaggtgctgtgcacagttagcaaaggcctggggtgaagaatgctgggaaaacttcaaggagctccttgtgcccacagtgctagtgagtgtggagattgtgggaaagaggctgggaaggcagattgaggagcagcctctggtgggatccctttgactattccccaccccactaccaccaacctcggaagcagaaaggttctgggtctcacaagtgcactgacccacatccctctcctgcccatgggatatggccacacaccccaccccatgcctcaggagctgtccatgagcagggaggtggagaacccttgggaatgtgggatgggtgtcctggctgtgggagaaggtcttcaccatgcctgccctgcccatcagctgcatccaggtgagactgggagagcacaacatcgaagtcctagaggggaatgaacagttcatctatgcggtcaagatcatccgccaccccaaatacaacagctggactctggacaatgacatcctgctgatcaagctctccacacctgccatcatcaatgcccatgtgtccaccatctctctgcccaccacccctccagctgctggcactgagtgcctcatctctggctggggcaacactctgagttctggcggtgagtgggaccctttgtccttctacttccctccatcctcacaatttccagaacgaagcacaccgcttaatgtgaatcctctcacttctaggcttaagacacatttctagtgcccattacacacaggctctgcactgggcaccagagagatgcaaattctcaaggacttggcttctaaaatcaaaagacaggacaaatggagaacttgctatgatcacatcttgggagaggttcaacaatgatcattctgggaactaaaagccagagtcccttgccaggacttatgttttgaagtcctctccaggggcagtgttcctcttcggtgttctatcctagattattgtctctttctctggcctaacccacatttctttctttgttctcttcctgatcctcacagccgactacccagacgagctgcagtgcctggatgctcctgtgctgagccaggctgagtatgaagcctcctaccctggaaagattaccaacaacgtgttttgtgtgggtttccttgagggaggcaaggattcctgccaggtgatttgaccccttcccatgctgaggcttccactgatacccaggcttcatctgggaaaaacatttgaactcccaagttggtggggctgagtctccctgcattgccccatggagaagtgaggaaggctcccttgggctgcaagctgtctgcttaggaagaacagagaatgggccactgtgagaaggatgtggagccacagagctggctggaaaggggtcttttaaggttcagagtaaatgtagctatattcctcctccatctctctcttcatacaacttgttccttcttctccccagggtgactctggtggcccagtggtctgcaatagacagctccaaggaattgtctcctggggctatggctggcccagaaaaacaggcctggagtctacaccaaggtctacaactatgtggactggattaaggacaccatagctgccaacagctaaagtccccagtccctctgcagtctctataccaataaagtgaccctggtctcactgtctgtgtctgtgcctgctccttcacactcctttacactggaaagcatcctccaatctcaggtcagacagggctgtcccccttaagggtcagcagagcccccagctcccaaaatgtgtcccatggtacactagattagcacatacaaacagatggaatccaaaaataaaaagaaatatcggagaaaggcgggcactgttttctagagaaacgtgtgtttcagaaaggtggtctttggcaggggatattgatttttatttgggcttctcagagcagttagagctactctaccttcagaacaatcacagcacagatattgtgtcagcatctttgaggtagcacaaaaaatctgaccagctgaatcttcttgctaaaatacaacaatgacaagtgctgttggtgatgtcatgactctcccaggaatgtgtcagcaccaaaccctcgaacaagccctcccttctcattcacctggaaaatcagactcaaataaatctccctggcccccaaactcttccctcaattccctagttccatctctgtgagcaggctagagagatgttccacctaccatagcgggagccagactgtgacttggaaatcaagcccagatttgcacgctgcattttcatcttttttgcctttggggtaggacaccacagtgaatcccacagctaacaccagcccccaatctgaccagggaaagaaactagagaggatcaggattcacccatttgatcaattagctgaggaaggattcattttcataaaacttgcttgcctttgagacacttcaaatgagttatttgggacactttaaaaaaggtggaaagaaagatctgagggctgtgacaccatgcagcaactctggccacacattggctgacttgcacccactggacacagcagagagaggcaggcttcatgtcacctgtgtcacctgccaaagcctcctcctggcaattctgagtgggaccatgttggggccgtagctcatacaactttgtcactgaagatccaagaaatcttctctttgaaattccaccttcaccttctgtcccaagtggttgtggacatccctgacagccagtaacaagggccaggagcagccaagggagacagacaagttcagagcacatttccagttacacggaacagagcacaggcctccaagtgtccacagagcagcgtgcaaattgcagggatgagtagagtaaaacctctacatggagcacagcattcctggaaaacacaggggactgcggtccacatgctgtggaatacacccaagtatgcatcagacacttgtttggtaaacagtaaatgtgtaagatcaattaccttaagagggccatctttgctccagatgtgtggttcgtgtgaagagacagctaccaatcactatcttcagaggaaaacagggctcagggctcacacacaatggatagatacacatgggtcacccaaaacttcgctgcatacaaacatcactttgttcaacatggattttgtttttatggagtccaaacgcagaccctagttcaccttacagccttgggtttgtctgcttttggagacatatattcaatagatagatagatagacaagacagatacattttttccctttcttactataatgtcaatgccttgtctgattatcatcatcactcaagagtcaagggaagaacaaaacacttcatataaacagggctgggcttggtggggagtgttagtttccagtgttttctgtctccattcagattattcctatcaaagtgcagcagctggttacctcaagccaagagacagacataaggatccctatggccttgcagacagctgcttccacctcctacctgggccccttagactctttacacaggaaagtgagtcaccccactgagaagcgttgccagcagaaacagggcatgaaaatcacagataaccatgggattacttccaagtggtcagtataaaatataccaatactaccaccaccaaaaacacaaaacaagcaaaaaaaaatgcttattcaaaaatccaagacaaagtactgtgtgagagccaggccatggggttgccttttctcagtccacacagctttcccagtccatttgctcacatggaaccatgagatgtgaaagtctgcagagggtgtgctcaggatggaggctggtactgtttatctgtgggtccagaccaaagggcaaagaggcagaaagctacaactctgtccactgccgcggcttagggcctccttctcacagaggctccgaagagcccccacctcagccttcacacaaaacatcaccttctggctgaactacagccaggctggagtgcggtggcatgatctctgctcactacaacctccacctcctgggttcaagtgattcagactcccaagtacctgggattacaggcacctgccaccatgccaagctaatttttttttttttttttttttgtatttttagtagagacaggctttcaccatgttggccaggctggttttgaactcctgatctcaagtgatccaaagtgttgagattacaggcatgagccactactcctggcccaggctccactctaaaaaaaaaaataatttcaagttttattttagattcttggctgcatagtattccatggtgtatatgtaccacatttcctttatccagtctaccgctgatggccacctaggttcattccatggctttgctactgtgaatagtgctgtgacggacatgcaagagcatgtgtctttttggcagaacagttattttccttcaggtaaatgcccaataaagaattgctgggtggaaaggtagttctgtttcaaattatttcagaaatctccaaactgctttctgcattaatttttccatgaactcatttacactctgaccaacagtgtataagcattccctttcctctgcagcctcaccagcatcttctgctttttgacattttaataatagccactctgcagccaagctctttcaaggccaacgtggggaacagccacaaacatcccttttcccgaagagagttcttgcctgcccactggtagatttcttgtttccatctgtctttcattgtttgtttttcaaagaaaaaccaaaggtaaagtggtatgatcttccacacctgaaccagtttgtagccaccagagcctgctgggaagggatccctcaaggatgcattgatcttgtcacctggaatttgagagatcaagaagccccatagcaacctaccatacaactgcccatcagcgctcatcctttcacaggattagctcaattctgactctgcagacactggcagccacaggtgacaaaccctgggcctctgtgggcttccttcatcacccagggccacagtgggctgcctgtcctaggcagagacacagcaacattctcttaagctgaaattaagcataaacccacttcaccaataatcatctgagggcacagtccctgcctccttccttggggattttaaaacacacatctctctgaccaaacaggtaggtgagatctgactttaaaggggggaaattgggatgaattggggtatcaggaatgaatcccaagtgtttttgtgtggcgaatggcatccacatcccaaaatatacttggagatggggaaaaaagcaggagaggagaagggtaaaaaaggaggacaaagtgtctgaaagtcattgaaagcttctctcatggttctttctggctctggttgctttgccaaggtcttgagtgcaggcagggctggctctggctgggagctgctgctctggaacatggaagagtcacttcaccttcagaaagctcatttgctcatctgtaaagtgggcaattccataggtggttgtgatgataaaatgaaaaaaaagttcttaacttatatgagtgacatgctgtatagtaagttacatgcctatataggaagcacacagaaatgattcactgttatgataatggaaggacagtggtttggcatgttaagcactaaacagaagccagaaagatatcttagagaagtagacaaagaaatctatagttcagaatgaacagtaccaagaatgacatgtcccccaaattgagcatgggtagctggatctgaacctatcctacacatctgagtctacagtatgaggtaacagtcttcacctatagctatctcctctgcctgtaaggtcattcctttttgaagaaagctgacctcagactatactgtgatcgcttaaggaagagcacaaaatactggagaaggctagtcttcaagctctagatacagaaaatcctcaattcttgggtgttacctttcagaaaaagagtccgagctacaagccctgatccaaaaatccctttttccaaaaaaattctccatcttctaccaaggttcacctccctgtttagtgtacactggtgtctatagttgctagagcaagagtctctccttatcctctaaggcaggagttctgtgaagaccccatgacaaggggacaaaatgaaataacatgttcagggacaacacagcaaaaccccatattatcaatgctctaaaacctagctacctcaggcttggccagttattcatgagcagagaggtgtgtcatctacatggcagtcatggcctggatgggtctggaactgtggcaaggtaaggctctgagaaaaggtgccaggagaaagatgaattcaatcatctatttctgccaggaagaaaagcaccaggaaggaatcagatgtacagtttgtcctctggggacctctgccttgatcctcaataaatctccttttagatgccacgtgcagcaattcccacacttcacaatgctctccatggcttctgttggccttatggtcagctctgccaagatctgtattcttgggcaagacagaatccttctgaatctcagtctcttcctctataaatggaaataattttgctccacacaagtcaccattagcacgttggtgggaagttaaactgcgaaactcagcataaacaaagagcaatgtaccactgttgcttacgtgaaaactcccgtgaagcagtcaggcaccatgcaccatctaagcatagcagcgttaggtatcagcctattagtgattagagagggtaccggggagagagggggcctcagagcagtgggtctcctggctgtggggaagctgcctcagtggccatgccaggagctgaacctgaaggtactctgtgtgtcctctcaacaccatggaccctattttggtatttttttccagttacctctggtttccatttgcttcctccctctagccccctggccatgtccgatttctccagcaagtttctgagcttttctcattttgctcactgtctccagaacatccctgcttcttttacctttcaaagaattcaaacttgaactctgctcactcctgcccatcaccaacattagctcagagttgatgagaagggaaagcaccctcataaggaagcccctcctttccttacattattagacctgagcgcagacagcatctccatctccacactgctctggccaggttatgcctcagtcaattacacgactgtatcttagtacccttggtagggctcaaatcaggatattctctagaaagattcacttagtactgagccaagtataatctcactacatctaaaatagaaaattctagacccacccctccacatctttgttattgaacccaatatgtcacccatttaccatgtgctcaaatccctacctactgctgattctcagatcaaatcataacccagatttaccatggtccaaactctgacatgtgatcaggggcatgtcattctggttcaggctgtcagccccaagcaggtgggtcagtttcaatcaccctgagtgcaggttgcaagggcaaccatgaggctgcataaaaagaacctatgacaggatgcacatgagagacaaatgtcttcacattgaagaaggggaggagtgcgccattggttttccatcctccagatgcactgagtaagctcctacctaacctgtgccccctccttcttctcatccctatgccgtggtaggagggagagccatcttcaagcccagcatcctatggaatgctgagtctctcttctccttaccccttaatgttggaattctcattccccaaagccttggatttgactttcccactgagtgactggagagaagcatcttcatattcacaggaacaagccttagttagataagactttgctcctctcctgggagctccaggacactaaaaagccaagcttgctaccaacgcttgcccttccttaagtacattaaatataaccccaatagtaaaatatattcctaaacagccaggccattctccctccttctaaccctcatctcctcggcctaagaaagcccagctgtgtgatctggggcttggcttcccctgtctttcccatatcagcatccttccaggaaacagccggtctccctctctgctctcagaaggcaagtttccttatcacctgtgaatcacaaacccacagagtggccaaacatactgatgcaagaccataggaaggggaaagctgcaggtgtgtttgtgctgggaggagcagtgaccctcacctcacagacacctcctctccccatcctcgggaggtataaagacgggttctccaccagcaatcaggcacactctaccaccatgaatctacttctgatccttacctttgttgcagctgctggtgagtttcacgccctgcctcaggcctcaaccaacccttccctggcagacacatgccctgccattcttgccacctctcctcttttgactgtgctgtgatattctatttcctccatctggcatttcttcttcccatcctccttgggctctttttaagcctcacttgttccaccttctccttgatttcactcccaccgctgttattcatccatatccgagctgtggttggagaagctgggaagggagaccaggtggggctggcccatgaaatgaagcagtaggcttcaggcttggctctgacagcaccacaatagcaccactatagctgctcttaacctcgaatgcacctgaggaggctgaaaaattactcatgccagagactcaactctagaaattctcacttcaattgtctggtgtgcagcctgtgttctgggcttttaagcttcccaggtgatttttaacatttctaggcatgcagccaaggttaagaattgctgttgttttgaccaataataacgtatacctttgttctgcaaaagtgagcctggggcttccctcaactctgccctcactgggcagatttgagctgagggggaaactggtcatggccaagtcgatgtcgccagggggttttcctagcttggccaaagtagccagacaatccggggcttaaataaccaggtggagtacacaggtggtgaataaaagagagaagacttcagtgcttgagacagccacatcccaaatcctatcccactggaagtattgtgaggatattccttgcgtcctcagcctggtgaccccaggagagatctgaacccccacagggtacctagctacgtgccctgcagacacagagacttgggagccacatccagtgatgatcaccagggctggcagcgctcccccccttgcctagcctcactgagcttgttaaggttttctaattagcaggaagcagccacaggctgggagcgccacccctaacatgctactgacttgccttctcccttcccatctccactccagttgctgccccctttgatgatgatgacaagatcgttgggggctacatctgtgaggagaattctgtcccctaccaggtgtccttgaattctggctaccacttctgcggtggctccctcatcagcgaacagtgggtggtgtcagcaggtcactgctacaagtcgtaagtgtggggcccctgactgcaaaactcccagccaggctgcctgggagagcttggattcagcccagggaagtactgaggttgggtaggacggacgagagagatggtggaaaagaaaacttgttggcagcagctgactctccagagcagagagtgaacacaagacaggaagccctcacacccaggcaaatccatgaaacagcaagggttgtggtcataaaagcaggcagggatgatcttggggtggtgagagctagtgagaagagcaggctagtacttttgctggttagctacacattaaagccacctaagaatgagtacttaaaaatactgatccctgtgttctatcccagggcaattaactcaaaattatcaggaagagggtgtgaatatcagtgagtatttcacactctacctctggtaactgtagagtgtatagacagagctgagaactgctgcctacaccaagaactcttaaacctgagtatgcatcagaactccctgcaggcttgttaaggcacaaatcactgggacccatccccaaggttctgatcagtaggtgggggtaaggaccaagaacttacatttctaacaaattcccaggagatgctaatgctatggctacccttggattagattacacagaagggtggtgctcaccaggccaagaatggagggaggagcaggcactgtgcacagttagcaaaggcctggagtgaagaatgttgggaaaacttcaaggagctccttgtgcccacagtgctagtgacatggagattatgggaaagagtctgggaaggcagattgaggagcagcctctggtgggatccctttgactcttccccactccactaccaccaacctctgaagcagaaaggtcctgggtttcacacctgcactgacccacattgctctcctgcccatgcgatatggccacacaccccaccccatgcctccagagctgtccatgagcagggagcttaaggacccatggaaaggtgggaggggtgccctggctgtgggagaaggtcttcaccatgcctgccctgcccatcagccgcatccaggtgagactgggagagcacaacatcgaagtcctggaggggaatgaacagttcatcaatgcagccaagatcatccgccaccccaaatacaacagccggactctggacaatgacatcctgctgatcaagctctcctcacctgccgtcatcaattcccgcgtgtccgccatctctctgcccactgcccctccagctgctggcaccgagtccctcatctccggctggggcaacactctgagttctggtggtgagtgggaccctttgtccttctacttccctccatcccacaatttccagaacaaaccatgccccttaacttaaatcctctcgcctccaggcttaagacacatttctagtgcccattacacacaggctctgcactgggcaccagagagatgcaaattctcaaggatgtggctcctaaaatcaaaagacaggacaaatggagaacttgctatgatcacttcgtgggagaggttcaacaatgatcattctgggaactaaaagccagagtcccttgccaggacttatgttttggagtcctctccaggggcagtgttcctcttcaatgttccatcctagactattgtctctttctctggcctaacccacatttctttctttgttctcttcctgatcctcacagccgactacccagacgagctgcagtgcctggatgctcctgtgctgagccaggctgagtgtgaagcctcctaccctggaaagattaccaacaacatgttctgtgtgggcttcctcgagggaggcaaggattcctgccaggtgatttgaccccttcccatgctgaggctcccactgataaccaggccccaccagggaaaatgatttgaactcccaaggtggcggggctgaggaggctccctgcagtgccccatggagaagtgaggaagactcctttgggctgcatcctgtctgcttaggaagaacagagaatgggccaccgtgagaaggacgtggagccacagagctggctggaaagggctcttttaaggttcagagcaaatgtaggtgtattcctcctccatctctctcttcatacaacttgtcccttctcccccccagggtgattctggtggccctgtggtctccaatggagagctccaaggaattgtctcctggggctatggctgtgcccagaagaacaggcctggagtctacaccaaggtctacaactatgtggactggattaaggacaccatagctgccaacagctaaagcccctggtccctctgcagtctctataccaataaagtgaccctgctctcactgtctgtgtctgtgcctcctccttcacactccttcacattggaaagcatcctccaacctcaggtcagacagggctctcccccttaaacataagcagagcctccagctcccaaatgtgttccatggtacactagattaacacatacaaagaggtggaatccaaaaataagaagcttgggagaaaggggggcactgttttctagagaaacgtgtgtttcagaaaggtggtcttcggcaggggctattgttttatttgggcttctcagagtggttagagctactctgccttcagaacaatcacagtacagaaaatgtgtcagcatcttcgaggtggcccaaaatatttgaccagctgaaacttcttgctaaaatacaacaataattacaaatgctgctggtgatgacgtgactctcccaggaatgtgttggcaccaaaccctcgaccaagccctcccttctcattcacctggaaaatcagactcaaataaatcttcctggccctccgactcttcccttaattccctagttccatctctgtgagcaggctagagagatgttccacctaccacagcgggagccagactgcgacttgggaatcaagcccagctcttcatgctgcatttttatcttctttgcctttggggtaggatgccacagtgaatcccacagctaacaccagctcctcactctgaccagggaaagaaactacagagggtcaggattcacccatttgatcaattaactgaggaaggattcattttcataaaacttgcttgactttgagacacttcaagtgagttatttgggattctttaaaaaaggtggaaggaaagatctgaggactgtgacacaaccagccactctgaccacacattgactggcttgcacccactggacacagcagagggaggcaggcttcatggcacttgcggcacctgccaaagcctccttctggcaattctgagagggcctaagttggggccgtagctcatccaagcttgtcacccaagatccaagcaagcttctctttgaaattccaccttcaccttctgtcccaagtggttgtggacatccctgggagctggcgctaagggccaggagcagccaagggagacagacaagttcagagcacatttccagttacagggaacagagcacaggcctccaagtgtccatggagcagcgtgcaaattgcagggatgagtagagtaaaacctctacatgcagcacagcattcctggcaaacacaggggaccacagtacacatgctgtggaatacacccaagtatgcatcagacacttgtttggtaaacagtaaatgtgtaagatcaattaccttgagagggccatctgtgctccagacatgtggtttgtgtgaggagacggctaccactcactatcttcagaggaaaacagggctcagggcttgcacacaatggacagatacacatgggtcacccaaaatgtcactgcatacaaacatcactttgttcaacatggattttgtttttatggagtccaaatgcagaccctagttcaccttacagccttgggtttgtctgctttgggagatatatatccagttgatagacagacaagacagatacatttttttccctttcttaccacaatgtcaatgcctcatctgaatatcatcattactcaagagtcaagagaagaaccaaacgcttcatataaacagggctgggctgggctagatggggagtgttagtttccagtgttttctgtctccattcagatcattcctatcaaagcccagctggtcacctcaagccaagacacagacataaggatcccaatggccttccagatggctgcttccacctcccattttggccacgtagactctttacacaggaaagtgagtcaccccagtgagaagggttgccagcggaaatagggcatgaaaatcacagataaccatgggatttcttccaagtggtcagtgtaaaataaaccaccaccaccaccaccgaaaacacaaaagaagcaaaaaaagtgcttattcaaaatccaagacaaaatactgtgtgagagtcaggccacggggttgccttttctcaggccacacagctttcccagtccgtttgctcgcatggaaccgtaagatgtgaaggcctgcagagcgtgtgcttgggatggaggctggtactgttcacctgtgggtccagaccaaagggcaaagaggcagaaaactgcaactctgtccaccggcacagcttaggcccttctgctcatagaggctctgaagaacccccacctcagccttcacacatatccttctggctgaactacagccaggctggagtgccatggcatgatctctgctcactacaacctccgcctccagggttcaagtgattcagcctcccaagtagctggaattacaggcacccaccactgtgcccagctaatttattttttattttatttatttatttatttatttatttatttatttatttatttatttattttgtatttttagcagagacagggtttcaccatgttggccagactggttttgaactcctgacctcaagtgatccaaagtgctgggattacaggcgtgagctaccgctcctggctcagaccccatttttaaaaaatattttcaacatttattttagattcatggggtacatgtgcagatttgttacatgggtatattgtgtgatgctgaggtctggggcacaaatgatctcctcactcaggcagtgaccatagtacccaataggtatttttttagctctatccaccctccttctctcttccctctagtagttgcagtgtctagtcttcccatctttatatccatgtgtacccaatgctcagctcccacttatacatgagaacgtgatatttggttttctgttcttatgttaatttgcttatgattatggtctccagctccatccatgttgctgtaaaggacatgatttcattcttttcatggctgcatagtattccatggtgtatatgtaccacatttccttcatccagtctaccgctgatggccacctaggttcattccatggctttgctactgtgaatagtgatgtgatggacatgtgagagcatgtgtctttttggcagaacaattattttcctttgggtaaatgcccagtaatggaattgctgggtgggaatcgtagttctgttttaaattatttcagaaatctccaaactgctttctgcattaatttttccatgaactcatttacactctgaccaacagtgtataggtgttccatttcctctgcagcctcaccagcatcttctgtttttgacattttaataatagccactctgcagccaagctctttcaaggccaatgtggagaagagccacaaacattccttttcccgaagagaattcttgcctgcccactggtagatttcttggtttcatctgtctttcattgtttgtttttcaaagaaaaaccaaaggtaaagtgataatgatcttccacacctgaaccagtttgtagccaccagagcctgctgggaaggggcccctcaagcatgcattgatcttgtgacctggaatttgagagatcaataagccccgtagcaacctaccatacaactgcccatcagcgctgatcctttcatgggattagctcaattctggctctgcagacactggcagccacagttgacaaaccctgggcctctgtgggcttcctttgtcacccagggccacagtgggctgcctgtcctaggcagagacgcagcaacattctcttaaactgaaattaagcataaatccacttcaccaataatcatctgagggctcagtccctgcctccttcctcggggattttaaaacacacatttctctgaccaaacaggtaggtgagatctgactttaaaaggagggaaaatcgggttgaattggggtatcaggaatgaatcccaagcatttttgtgtggcgagaggcatccacatcccaagctgtacctggagatggagaaaaatgcaggagagaagaagagaaaacaaagggggacaacgagccctggttgctttgccaaggtcttgggcacagacagggccagctctggctgggagctgctgctctaggggttgggagagttctgttcatccatggtgctcagcagcagggactgggggccgtggtaggtgcagatgcccagactctcaagcttgctccttgcatggctggcaggggcattgctccttgtcaccaggtgactgcacagggcagctgtcatggacatccagggggccatccagagcatcactgatgagcatgttgaatgctttggggccatcgtcatgttggccccagttgcacacatggtatcttctctttgcttggggcgaagggggcggggaggggcggggatagtctgccatgctcagagttgtaatcattcagcagctgctccatatattctaaatccttgcacaggaaggctcctcggcccaactcccccaggctggccacacagacactgggctccattcccaagtctttggtggctgctgtgtcagctggtgtcagaggccccagggtcagcaatgagtgggggtcttgtgctgcttctgctaggcccagccaaggggctgctctgtgcctcctgggagtcccagggtcactgccaccttaagggccacatgccatagctggaagtcactatatgtttggggaagagttggagatcgggaaaccattccctcataacaaggtagtaaatagtttggcaaaaaactgaagataaagtggcagtgctgagtaatcatgggcttcctacaggtgatcgggttgatttcttgttgccactgcctggcctgaagacagtgcttggctcagcggtggcagcagacgaagcagcagctcaagaggatgatgatggtggcccacaccagccagagccacagcagtgttttttgtcacaggtgtagcttggattgttggtaccacacaggcttatcccgtgggggttcaccctgggttgacaggggctgggcagcacctggaggaccaggaacaccacccacacccccacacacacaccacccagaccatctcctctgcaagcccctcctgctcctgctcctccatcacagcactgccctccttctgcttcctctcctcctctgccctccagaacagtggtcttaaagaggtttcttggccttggcacttctgtgggctcccaatgtgctgatgtgtgacacgctggcatgcttggcaagacctcactgctgcctttgactacacagggtcctctctgtacccagagcaaacatatgcaaggaaaccccagcactgaccgaatcagcttcctcggaggcccctctccacatgtgctcctgctaacccagtctgtacttcccacaagctgatgtcctgcttggagatgatcgtgctggccctcttgcccaacaactggctcctgtgtctggaggggagaagacaaatccctggtctccatccctcatgttcttgagaagtctgccttttattcctccacagaataataccaacatgtttacactattcctatgtatagacattttcccatttagttttctctcccctccggagtggttattaatccagcggtacagataagaaaacaggttcaaagaggcttattagtttacccacgtcccaagcccagcagatggtaggtctggggttgactcctcatttgcctggcttcaaagcccacgctctctgtgccccgcctcacatcccgctatgactgtggtctgaggtgatgacaagtccatcagcgctgacctctgatgtttctccagccccctgtcactatcacccattcccttcctccctgcatctcctgaggggcacctcccaattgtcccattccatgcggcaagacgactgctctcagagagctcctggttatggcattgctccctaccctcccacagtgatcaaactagaattcaagctccctggggaaatgtagggttctcctggcaccacccttgcccccactcccagtctcatgcctcttcactgctctcctcccctgtcccctcccctgctcagaagccctggtggcccatccaacaagccatgcgcctcctgcctctgtctctggacactatggcactctcagactggaagccgttcctaacctccccttcacccttttcagaaaagtcttcctgattcttccttgtccccacctcccttgggtctggctctgctggccctccctcgggtctgaggcagccatcctcctcctgtctccgcttgcctctgtcctagtcctgctcaggtgctcaggtgcaatagatgcgtccgtcctggcaatcaactgtgtgctcctcaagcgggtacatcttgtcttacatatcctgatatctccagtgattaagcaaagcctgggatgtaataagcacccagtgagtggaggaataaacatggagtggagggaaatgtgctgagaaaagaaagacccttccagaagaatgattctcaaagagtggtccctaagccagcaacaccaaaatctcctgggaatttaggagaaacacaaaagctaggccctaccccacacccaccgagtcagatctcctgggacagggcccaacaaacagcatatttttttatttgagatagggtcttgctctgttgcccaggctgaagtgcaatggcatgatcactgctcactgcagccttgacctcccaagctcaagtgatcctcccacctcagcctcccaagtagctaggaccacaggcgcacaccacaaacccagctaatattattattatttgtagagatggcaacctcatatgtcgctcaggctggtctcaaactcctaggctaaagtgatcgcctgcccctttgcctcccaaggtgctgggattacaggcgtgagccaccacacccagacagcaacctgcattttaacatatcttccaggtcttctgatgcccgctgaaaacttgagattggatacggtaatgacatccttaggccagtattgaaaccgccattgcaaaattgtaactgagacggtgaaacagatctgacccaaccaactctatcttgcggttttttttgtttttggttttgtttttttttttttttttttggagccggagtctcaatctgttgccaggctggagtgcagtggctcgatcttggctcactgctacctccacctcccaggttcaagtgattcccctgcctcagcctccccagtagctggaactacaggtgcacaccaccatgcctggctaattttttgtattttagtagaggcggggtttcaccatgttggccgggctggtctcaaactcctgacctcatgatccacctgcctctgcctaccaaagtactgggattatgggcgtgaacaaccgcgcctggcctccatcttgcttttaacctccaagctgtccttattccttccccagcataggctgaactaactttgggaagaacttagtttctagtttgaaacaaagacggtaacagttctttcccaaaacaaacctcctttttgcctggagactagactgtcttataggactaacaaatttgccaaaagattagaaattatggtttaggagtcacgtagctggagtctgcaagattccaaacctccccaaattgctcctggggataacgtcactattgtaaaacctaagatcagtgcttgagatattttaaagaccctgcacttgatgcatcagctggcacaacgcagatcgataaactagttcatctgatcttgtggcccccactcaggaaccgactcagcacaagaaagcagctggggtttcatctccaacccaacggatcagcactcccgactcactgctttcccctccgcccaccaaattatcctctaaaactcggatcctcgaattcccggggagacggcaagatttgatttgagtaatagtaaaactccagtctcccacacagtctgctctgggtgaattactctttctctatgtcaattcccctgtcttgataaatcggttctgtctatacagcaggcaaggtgaacctattgggcagttacgatatctctctgaaaacaagtcactattttttgtttgtttttgtttttgttttgtttttcagacagagtctctctctgtcgccaggctggagtgcaatggtgcgatctcggctcactgcaacctccgcctcccgggttcaagctattctcctgcctcagcctcccaagtagctgggattacaggcaagcgccaccacgcccggctaattttttgtatttttagtagagacagggtttcaccatgttagccaggctggtctcgaactcctgacctcaggtgatccacccgcgtccgcctcccaaagtgctgggattacagacgtgagccaccgcgcccggcttcagtcactaacatttttactgactcttctggcaccatgattaaccccgacacgcactatcgcatgcaattctcacaaccccatgaggtaggtattattattgctcctagcttacagataaagagacagagtttaagaggtttagccacgctacggggctgctgggagcccggcagtctggccacaggaggtcggtttcacggaagggcaggatgtggcggcatctcctgaatttaaggagtcttgggggcgcggtgcttctctgtcattgggcaactcattttagcctcttggggtttcagttcctcaactgagaacaaggaatttaggttgaaatgaacatgctggaaagctttcaagaattgcacacgtgaaatgctctttgcgtgtctcccggtctcccacccgcccccgacacagaggcgcaggagtaaccctgctcccttccgcgtcctcgccccaccacgagctgcgcattcttctcgccccctcaagtggccgagctcagattgcagttacttaggtctaaaaaaataaggaaaggctgccccctgctgcccacatggatgcatgaccccaacctgatacctgcctaactggtcttcctagcttttatggaaaaaacgctgcatatgagcttgggcataccgtccagagaggcaaaactgggacaaactccatcggaattctaaaaaaccatgatgccaagacagagtggcattattatttataaggccagtagggatgagggcccccactaggtgattaaaagacactaacttagaggatgaattattgataagtaaacgaggtgagtaaggcaggaaaacatgcagaaatagatcaaaataaactgaatatttcaattaggaaaggtactggcaagaggctttgacacaatccaatggatgaaagcaatcaactttttttttttttttttttttgacagagtctcactctgtcgcccaggctggagtgcagtgactcaatctcggctcactgcaacctccacctcatgggttcaagcgattctcctccctcagcctcccgagtagctgggactacaggcgcacaccaccatgcccggctaatttttttgtatttttagtagagacagggtttcaccgtgttagccaggatggtctcgaactcctgacctcatgattcgccctcctcggcctcccaaagtgctgagattacaggcgtgagccactgcacctggctgcaatcaactttttatgcaggcatttggtagcatgttgcgaggtccatcactattaatgccgtgaatataccaaatcctctttttctttcttccctaagttctaagggccatgccctggcaccaaacttatggcagtcctagactgccctctgatgttcaccatggcttacctctgccctgttctagttggggacaagctgtgggtcccaagcctggcattgtaacagaaacgcccagggtaattttctgtttgtttatttaaataaataaataagtaaactcagtcttggagattttaactcaataggtcatgaagactactcagaaatctacatttttcacagttgtccaagtgattaagtcctcactgagcaaattcaggacaaggaaacaacttcttacataaattctacataacttcatacataacttcacacataaacttctttggcaaaaaaaatgactttgtaaattaaacaagtaggtttttaaagtagcatattttatttaaagccaaattttcttgatttttaaaattaacttaagtttgactttcaatagacaatagagctatatgactctaaaatggaaacaacccagtaacgttgacactgggaaatgtaacttttacttccgctctgtttctgtctactccacccattctttcttttctttttttttttttttttttttttttttgttttgatagagtctcaccgtgtcgcccaggctggagtacagtggcgtgatcttggctcactggaacctccgcctcctgggttcaagtgattcttctacctcagcagcctctcaagtagctgggattatagtcacctgccaccacgcccagctaatttttttttttttttttttgtactttcagtgaagatggggttttgccgtgttggtcaggctggtctcgaactcctggcctcaggtgatccgcctgccttggccttccaaagtgctgagattacaggggtgagccaccgcacgtggcctactccactcattcttaataggtcatcactcttgtcagtttctgttgtatctttacagtgtttctgtatacaaaatgtatacaaaatcaagtaaatacaaaagtataattcttcttttcccccctctgttagacaaaggtgtcatctagttatgctattctgagactttctcttttctgggttaataatgtatcttagagaattttccatagcaatataaaatattttgattctttttttagcattgaatattactccattgtgtgaacatatcacagtttatccagtcccttactgatgggcatataattcaattttgtcagtcaaattagtgaaaagtgtattttgatgaagtttttttaattttatttttcttattgtgattttttttcccttatagttaggtaccatttggatttatttttctctgaacaatttactcttcacctatttttattgggctgctggattattttcctattgatttttaggagttcaccacatgttgaggagattagccctgatggtgagaactaggaatatttttcccagattgttatgtatattttgattctgtttatattttaccatgcgagtgtgtcatcattatgtcgttgtttgtcttttttttttttttttctggattttaagtcatagcttaaaaccctccgagtgacgcacagcctcggggcagggccagggtagtgatgggggctgtggcttctctataaggacatgccccaacgtgacaacagcttggagaggggtgggtactggagaagaccagccccttcgccaaacagccttacaaagacatccagctctaaggagctcaaaacatcctgaggacagtgcctggaggtgagaaggaagcccccggcctggtccataccccaccaccaacttgcataatggggggtgatgtcacccaccctccactcccctcaaaggagcagctgctctggtggtctctcccaggctctgggggcggacccatgggaggggctgtttttgtacaaagctgtaacattgtggggacagggggccacaatgattcaactctacgggaaacctttacaaaaacctctctggcggtcccaactcccagagtcctcttctttcctcctgggtcacaggtcttaatgcaatttggttcagaatgcctctgcctcactcctgatcacatgtcagaccaagactgtggacaaggacaggcccagatgagaactaaagcttcccaggcagagagaggtcagacataagaagactgcctcaggaacctcacaagtggaggactcagggagggtcccaatccccaaaaattgagacaaagtcaggtggaaggttcatcggaggtgaccagctctccagaggactcgggaagaagtcaggggtatctatagatggagtcacaggttctgggcccctgccatcctctgcaggccatgcactttccctttcgatggaccctcacagagggagcatctgaatggggcatcctttgaaaaaggaacctaggaccctgtggatggactctgtcattctccatggtcctaaaaagcaaaagtcaaagtgttcttctgtgtaatacccataaagcacaggaggagatttcttagctcactgtcctccatcctagccagggccctctcccctctctatgccttcaatgtgattttcaccttgacccctgtcactgtgtgaacactgaagctttctttggacaaggcaccagactcacagttgtaggtaagacatttttcaggttcttttgcagatccgtcacagggaaaagtgggtccacagtgtcccttttagagtggctatattcttatgtgctaactatggctacaccttcggttcggggaccaggttaaccgttgtaggtaaggctgggggtctctaggaggggtgcgatgagggaggactctgtcctgggaaatgtcaaagagaacagagatcccagctcccggagccagactgagggagacgtcatgtcatgtcccgggattgagttcaggggaggctccctgtgagggcgaatccacccaggcttcccagaggctctgagcagtcacagctgagcccagggtgatggggcagaagagggaaggggagggggcctctcctcatagttccctgagatagcccagagaaagcccggtgggtaatgaatgagccacaacacctctccatctatctgcttcactgacagaggttctctgtagattcttcgtatattcctgtgctggattttataggaggccactctgtgtctctttttgtcacctgcctgagtcttgggcaagctctggaagggaacacagagtactggaagcagagctgctgtccctgtgagggaagagttcccatgaactcccaacctctgcctgaatcccagctgtgctcagcagagactggggggttttgaagtggccctgggaggctgtgctctggaaacaccatatattttggagagggaagttggctcactgttgtaggtgagtaagtcaaggctggacagctgggaacttgcaaaaaggggctggaatccagacggagcctttgtctctagtgcttaggtgaaagtgtatttttgtcaggaaggcctatgaggcagatgaggaggggatagcctccctctcctctcgactattttgtagactgcctgtgccaagttaggttcccctactgagagatgggtagactcagcttggaaggggtcaccttgaacatctcctgtctccttgaagggtgccggtcacggccatgacagataaaagagcctctgaccttaccaccacggtcctaccgtttctctccctcacacagaaaggagaaggtcacagaagagggaacttgggggatcacacggggcctaattggtctgctgaccaccgcattttgggttgtaccattgtctacccctctacccaccagggttaaaattctactaaggaacaggagaggacctggcaggtggacttggggaggcaggagtggaaggcagcaggtcgcggttttccttccagtctttaatgttgtgcaactaatgaaaaactgttttttggcagtggaacccagctctctgtcttgggtatgtaaaagacttctttcgggatagtgtatcataaggtcggagttccaggaggaccccttgcgggagggcagaaactgagaacacagccaagaaaagctcataaaatgtgggtcagtggagtgtgtggtggggccccaagagttctgtgtgtaagcagcttctggaaggaagggcccacaccagctcctctggggtttgccacactcatgatgcactgtgtagcaatcagccccagcattttggtgatgggactcgactctccatcctaggtaagttgcagaatcagggtggtatggccattgtcccttgaaggcagagttctctgcttctcctcccggtgctggtgaggcagattgagtaaaatctcttaccccatggggtaagagctgtgcctgtgcctgcgttccctttggtgtgtcttggttgactcctctatttctcttctctaagtcttcagtccataatctgcctcctcactcccttcttggctcatcctccctcttatgtgcatggctctgcctctcctaagcctcttcctcttgcgccttatgctgcacagtatgcttaggcctttttcctaacagaatccctttggtccagagccatgaatccaggcagagaaaggcagccatcctgctgtcagggagctaagacttgccctctgactggagatcgccgggtgggttttatctaagcctctgcagctgtgctcctataattcacccctccactttgggaacgggaccaggctcactgtgacaggtatgggggctccactcttgactcgggggtgcctgggtttgactgcaatgatcagttgctgggaagggaattgagtgtaagaacggaggtcagggtcaccccttcttacctggagcactgtgccctctcctcccctccctggagctcttccagcttgttgctctgctgtgttgcctgcagttcctcagctgtagagctccttgcttagtcttcagggctgtgtgtttctttgctcttcttttcattgttttctgggactcttctcatctctactttcttagtggatgtattgttttactttcccttttttaaattgcatcttctccattttttccttcccattctaactccacttctgcattgttgactccttttggtgactagctctgtcttctatgttaagattctccccactgccagcctccagcacagaactctgctcatgtcttcatctccctccttctttctttctctaccagtcttagaagatgcatctatgtcttcctgaggtagtttgaaggttcatgagccaggcatgaccaggttggggagacaggtggtttcagggttgctcttgaggcctgagggcagaagtccctgtcacagcattgggcgagctgcagggagtctctgaggtgcctgtgtttggcaggtgtttgggagataggtctgaagagagtgttacaactggaaactgacattatcttagcaacagataaggtataaagaagacaaaatgggtaggagactctattttctttttttctgagacggtgtctagctctattgcccaggctggagtgcagtggcacgatctcggctcactgcaacctccgcctcctgggtttgagcgattctcctcccttggcctcccgagtagctgggattacaggtgcctgccaccaaacccagctactttttgcatttttagtagagatagggtttcactgtgttagccgggctgttctcaaactcctgacctcgtgatccgcctgccttggcctcccaaagtgctgggattacaaatgtgagccactgcacccagccaagactccattctcttaagcctcagaatctatgctagaacaatagggtaaaggccccaccaggaagccctagtacaaccttccccatgctggggaggaagcagacaggcggtggagcggggttgggatgggatgaggtctaggatggagacatagacaagggtggaggaatgggactcatagggtctaccaaagtttaggggcttgggcagacattagtgtaggtggggacacacaccaagacgttgagtggaaagtacaaatcaccagattcaaaggcctgggttcaaggggctgtggtgggggaggtgtgcaatttgaaaagcaacttaagctgcctcctctctaagacatagaaacagaagagactaacttatatgaaaatcctttgtaaaggattttgtaaaggactcaacttgtggtgacaatccttttcattcctgttgtttatgatcactaggtcacagggtttgcctttttccaaacctgcatctcaattttcccatcaaaaacatttcccaaatttggataaagaacccatatctagacttgccacatttctgcaccaaaagctcactctcatggttggaacagagccaagcaaagggcacagtaaattgtggtttcttccactcctcatgtgtcttcagatgaaatcattctttccaataatcccagaaattctttctctcctctctcaagcatgtgaaaaggtccagagctctgcagtgtgagctttctactgaaatggcccttggactttgtggttcattcatactcagtggtctagcttgtactacttttgagaatgcaaagcttaactgtggacggattccaatcctggccaggcagggttgctggacactctgagagaagaaagggttaatcccatgaccatcaacttccatgggatttcagccatcctggacaagctaccacaccctcctgccccaggggaggaggaaatgtggaccatcccatcagatattgaccaggtttggctctttaaagagggttacatgcaagaaaataaaattttttaaaaaggtgctgggcaggtgggggactcagatgtaatggaaaagtgtcttttctagaaaagaaaagctaattctaatatgtgtcactaccccacgagacaaatatatacatcttgatttaaaaaaggaaaattataattagaaaaagtcaatttagttattgtaattataccactaatgagagtttcctacctcgagtttcaggattacatagccatgcaccaagcaaggctttgaaaaataaagatacacagataaattatttggatagatgatcagacaagcctcagtaaaaacagccaagacaatcaggatataatgtgaccataggaagctggggagacagtaggcaatgtgcatccatgggacagcatagaaaggaggggcaaagtggagagagagcaacagacactgggatggtgaccccaaaacaatgagggcctagaatgacatagttgtgcttcattacggcccattcccagggctctctctcacacacacagagcccctaccagaaccagacagctctcagagcaaccctggctccaacccctcttccctttccagaggacctgaacaaggtgttcccacccgaggtcgctgtgtttgagccatcagaagcagagatctcccacacccaaaaggccacactggtgtgcctggccacaggcttcttccccgaccacgtggagctgagctggtgggtgaatgggaaggaggtgcacagtggggtcagcacagacccgcagcccctcaaggagcagcccgccctcaatgactccagatactgcctgagcagccgcctgagggtctcggccaccttctggcagaacccccgcaaccacttccgctgtcaagtccagttctacgggctctcggagaatgacgagtggacccaggatagggccaaacccgtcacccagatcgtcagcgccgaggcctggggtagagcaggtgagtggggcctggggagatgcctggaggagattaggtgagaccagctaccagggaaaatggaaagatccaggtagcagacaagactagatccaaaaagaaaggaaccagcgcacaccatgaaggagaattgggcacctgtggttcattcttctcccagattctcagcccaacagagccaagcagctgggtcccctttctatgtggcctgtgtaactctcatctgggtggtgccccccatccccctcagtgctgccacatgccatggattgcaaggacaatgtggctgacatctgcatggcagaagaaaggaggtgctgggctgtcagaggaagctggtctgggcctgggagtctgtgccaactgcaaatctgactttacttttaattgcctatgaaaataaggtctctcatttattttcctctccctgctttctttcagactgtggctttacctcgggtaagtaagcccttccttttcctctccctctctcatggttcttgacctagaaccaaggcatgaagaactcacagacactggagggtggagggtgggagagaccagagctacctgtgcacaggtacccacctgtccttcctccgtgccaacagtgtcctaccagcaaggggtcctgtctgccaccatcctctatgagatcctgctagggaaggccaccctgtatgctgtgctggtcagcgcccttgtgttgatggccatggtaagcaggagggcaggatggggccagcaggctggaggtgacacactgacaccaagcacccagaagtatagagtccctgccaggattggagctgggcagtagggagggaagagatttcattcaggtgcctcagaagataacttgcacctctgtaggatcacagtggaagggtcatgctgggaaggagaagctggagtcaccagaaaacccaatggatgttgtgatgagccttactatttgtgtggtcaatgggccctactactttctctcaatcctcacaactcctggctcttaataacccccaaaactttctcttctgcaggtcaagagaaaggatttctgaaggcagccctggaagtggagttaggagcttctaacccgtcatggtttcaatacacattcttcttttgccagcgcttctgaagagctgctctcacctctctgcatcccaatagatatccccctatgtgcatgcacacctgcacactcacggctgaaatctccctaacccagggggaccttagcatgcctaagtgactaaaccaataaaaatgttctggtctggcctgactctgacttgtgaatgtctggatagctccttggctgtctctgaactccctgtgactctccccattcagtcaggatagaaacaagaggtattcaaggaaaatgcagactcttcacgtaagagggatgaggggcccaccttgagatcaatagcagaggttaattcagcgtgaaaggcagtgatgggagctgaagaggttacttctagaacagtctaggaagacacagatgttgagtataggaattttctatatccaactatactgttctgcccaggaaagacgtgctcagaggaagagccaacctatacaggtgtgttcaccctccagctggccatgtccccgtgactaacaaagctggattccataagcatcacccaccttccttgcagctttcttattgagcactccattcatcttcattggttcaccaagttgatttcccagctccaaagaagagaggctctgacttgcaaacttattttcaatggaagatgtgtcttccggtttaagttacccatctgtttataaatctctctctagtgaattaaaccagaatgaaaatgtcccctaatcattcctggaaggttagaaaataaaggtatctaaaactgagaatcagccccattcctacttctagaattccttcaaaagctccttctgttgtctcactgtcaccatggtgatggagtcccaaatcccaaaggtggcacagaagaccggatgattatccttgtctccttccacactctcctcacttctctcatccctgaagcccctgagctgcttctttcaggccgctttgcacatgctcttcctcctggggtgacaaagtactcttctccccatgataactcctgcttagacttaaagatttagctccaatgtcttcccctccaaaaagctttctctggccctttcttgcctcttccttacctcttcctcccttgaggctggattaaatacacctttattttgctatcacagtgccttgtgcataaccttctttgtgatacatcacacttgctggaaactacctctttatttgtctgacacccccagggactatgaactccttgttaacaaggatacattttaagatagtatcccagggctatagtatagtaacctcagtttagtgtagacaccacataggtatgtatgaataaataaatgaataaatgagtgaacccaaactgacccaatccaggagcaatcatcaccgtaagtcctgcctgaaatagccattacccttccatttataggactacaccacacagtcttccctctttattgcaacacatacatgcattcaaagatgcgtgtgtgcatgtatgcacacgcgtgtatatgtttatatttacacacatgtacacacatccactcattaaacacatatccctgtgatgtgttgttatcaacttccaagaaaattaagatacccaaattacagtccccaagaagcgtatctgttcacagagcaactcaatcatgaacagaaagagccaaacgcaagtccatgctttgaaagagcaacatgaactgcttactaaaatgcagtcagagagtggccctcaatttctcactgggataatcagtaaagagtctgagaaggtggcaatctcttcaaaggaagaattggtctcagttgttcactctagagaatggccatgctggtcagaggcatgaacaaaagccctaatgacatggctaggtacctctgggtaggcccgtttagctggttgcaaggttcagaaatgggagtgctcaaaattagcgctggaaaggcaggttggtgcatgccactctgggaataaacttacctccatgcaaccagcatggagcctgcacatggtggatgttcactaaacacctgtggagtaaatgaagaatatggagttcagacatcgttcaggaagcaactgaacaaagggaaattatagaggtttctggattgtttgtcctcctgtcataaggtgccatcaactgctctgtggattttcctatgagctgcctgccacccctcgctcctcccacccacttcactataaatgccagtctgagcaggtgggcacagtgagccccaccagggagacccagtgacatagatggtctgctcagggtgatgcatgttccaaggagggacctctctgccccccaccattaccatcactgtgactttccccaagcccttcccattttaattcactgcctttgtcttttccaagccccacacagtcagactaacctctgccacctgcgcttcctgccgctgcccagtggttgggggagggggactagcagggaggaaacatttttgtatcatggtgtaacattgtggggactagcgggagggcacgatgattcaggtagaggaggtgcttttacaaaaaaccctgatgcagtaagcatccccacccagctcagggaatgcagctaccaggtgggaagagttctctggggctggtcccagctgtggtcttgcagggtcccccaacccagcgagcacctgtccatctccctgtccagactcggcttccaaggaataagaaggccaagacagcaaagtgggattatcactcagcacttttaataaaacttgttcttgacaaagtacttgcacatgcattatttattaagaactgatgaaaaccctgagggaaagatattgtcccatctttccaatgaggaaactgagatcagaggttacaggtcatataactaggaaacggcaaggtctagcctgcaatatcgcccagctccagccgttccagtaccaccaatgccccttcagatttcaaatccactgtgttgtcccccagccaagtggattctcctctgcaaattggtggtggcctcatgcaagatccaggttaccgtgtccagctaactcgagacaggaaaagataggctcaggaaagagaggaagggtgtgccctctgtctgtgctaagggaggtggggaaggagaaggaattctgggcagccccttcccactgtgctcctacaatgagcagttcttcgggccagggacacggctcaccgtgctaggtaagaagggggctccaggtgggagagagggtgagcagcccagcctgcacgaccccagaaccctgttcttaggggagtggacactgggcaatccagggccctcctcgagggaagcggggtttgcgccagggtccccagggctgtgcgaacaccggggagctgttttttggagaaggctctaggctgaccgtactgggtaaggaggcggttggggctccggagagctccgagagggcgggatgggcagaggtaagcagctgccccactctgagaggggctgtgctgagaggcgctgctgggcgtctgggcggaggactcctggttctgggtgctgggagagcgatggggctctcagcggtgggaaggacccgagctgagtctgggacagcagagcgggcagcaccggtttttgtcctgggcctccaggctgtgagcacagatacgcagtattttggcccaggcacccggctgacagtgctcggtaagcgggggctcccgctgaagccccggaactggggagggggcgccccgggacgccgggggcgtcgcagggccagtttctgtgccgcgtctcggggctgtgagccaaaaacattcagtacttcggcgccgggacccggctctcagtgctgggtaagctggggccgccgggggaccggggacgagactgcgctcgggtttttgtgcggggctcgggggccgtgaccaagagacccagtacttcgggccaggcacgcggctcctggtgctcggtgagcgcgggctgctggggcgcgggcgcgggcggcttgggtctggtttttgcggggagtccccgggctgtgctctggggccaacgtcctgactttcggggccggcagcaggctgaccgtgctgggtgagttttcgcgggaccacccgggcggcgggattcaggtggaaggcggcggctgcttcgcggcacccggtccggccctgtgctgggagacctgggctgggtccccagggtgggcaggagctcggggagccttagaggtttgcatgcgggggtgcacctccgtgctcctacgagcagtacttcgggccgggcaccaggctcacggtcacaggtgagattcgggcgtctccccaccttccagcccctcggtccccggagtcggagggtggaccggagctggaggagctgggtgtccggggtcagctctgcaaggtcacctccccgctcctggggaaagactggggaagagggagggggtggggaggtgctcagagtccggaaagctgagcagagggcgaggccacttttaatcttttttctggggtgtttagagagaaggtgaacgatggaggagaggatttgttaggactctgggagaggcgagactggagaggacgaagggaaatcctggtttggggaatgggtaggagtgggggtaactgctattcgtaggcaaaaagagctgagcaggctgggaacagcgcgggtgggcaagggtcagcactgcgggcaggcgggtgggtgttagggggcagaaatcctgcagccgagggtgcagtagaacacagaagaaaaagcctgccaaacaaaagtggaacagagaagccaaaaagggagatgaacatgagtcagtgaagaaaagaatgaaagtttactgtttagcagtgtggatctctaatccgacttaaaactccttgttcccgattcctattcctcctaagccagagatccctgggtccagggtgagggcacggcattcatgcttacccacgggctggtcaacaaagaggtgctgacctgagagtagggcacataacctcagccactggggtacacttaccacccccgcccccgtgtagctccctcccctatcctgaaatctcccttagcacactaagtattctaggttaaacagcccagatgttcagggagttcattcgccacaaacacacattaaaatgcagacaatttgcctgtgagatgaggaaaattctctggaagatttaggccctgagagctgaaaagggaccctaaacattacctggtgacaactgccctgaggccagagaagagaactcacaatattggtatattaaccggtaccatttgtagttaggctgtcattaatctgggtgtaatggggctcagctacagagaagcgtatccagaggaaatgtggggttcctgcagtcagctggggcaccgaaaagacccagactttagaaccagataaaggctgagttcgaacctctggttcttttgtgatgtggtgaccttgggcaaattaatgtgtgaacctcagtttcctcaactataaaatgtaatgaacaatacctaccacttactattgctgtgaggaagaaaagagagtcaacatgtaccgtgtacagattattgatgtaattcaatggttcttttccccatcctcctaggaggtcactggggagacagggggcagggtcagcccagtgccaaaggatgggcaggatctgaagtgtggaaatggagtaaggctgtgtctgtgtcagaggtgggttgggaagatgtgagacaaacatcacaattttgcctaaggtgaatccaacccacaagtagagcacaggccaacagcagctcactagtacacatacttacaccagcagctcactagtacacacacttacaccagacgctcactggtacacactcacaccagagctcattagaacacacacaccgtcagcttgctagtacacacacttacaccagaagctcactagtatacacttacaccagaagctcactagtacacacacttactccagaagctcactagtacacacacttacacccacagagacaagccccacaccacacggactcacaaatgcagaagaagagttgaccctgccctcatgtacagatagtatgctggtgtgtagtgagaggcggctagtgttcgccacgcctgttgcatcaataactattccacagaacagcatacatggtcaaggaatatttttaatatttacaatgaggactgagtgtttgctaaatgaagaaatcaaaggagtacattctggagggctggtagactcccagagccagggtttttgagatgagagtgaaaataagcaggctgagagcagaaagaaagaaagttctgcagatagaagttaggatattaccacttcggccccagcccagccagtaaatgtttagaagcatagtagtaattagcaggtaggagttgtggggaggaaaggaaactgacatgatgggaagcaggaccagctacaaaatcttcaggaccagctcagaatgaaaatgccggggctcgtgttaaatcttaggatttcaacatggtgacagcagagcactaaaccaagcagggggcccttctagcaggaggccccatggggacctaggaaggaggtcacatccatacaaatgtaaagaaatgtcagagtaaatttcctccattgtccaggagattcggaataggttctcctaagactgatatttcttcattttaatagagttgctcagaaatgaaaaacaatcaatgggaagaaaaagaaaaaaaaaaaagataagatgagtaggagggcaggtccaaaagaagtgattcagcaaaatgaaaggggtcctcagggattaaaggggatgaatttacctgtcatccctaagaatctacaaaggagatgctcaggacagaaactgtatcaacacaactagtagcaagaagttactctgatgatatcagatgtttatttgggaaacttgctagtagagaaagctacatataatatttggatgcaaagggacacagaaggttgaagagtccctaattttgaaataagggaagatgactaactgtctgagctgagaaaactcaggggtacctggaggcagaggaatggataagatgacttcatgcaccacaaaaagaaaaaacctcacattctcatgaacgcactgtaaaaccaaaggatgtcctcatgtgaatgcaaaaaataggccatctgtaaatccaaagaaagcccccagatctaaaatgtctccctcatcccagattccccttcattcctgagcaccttagatttggtataaataacctgcttgggagggggctttttgaattcgtacataatttaaccttcacacagtttctgcaaagtcagaatggtgattattacctcacatgcagaaaaaagtgataggaatttctgtcttaaaagtcttgttggtggacaaaggaagttctaggatttggatcttgtttttttgggttccaatcccttgctccagttaaaaaactaccacataaaatggtgagaagtaggtaggcaagtttttattgatagagaggaaatcaaataatggcaatgaggagacatcacctggaatgttaggcagtgcctaactgggggatggacagacaatgggcagtgccaacccatagggtggatacaaaagacaggcaaggaaggggtagaaccatcaaagaggaataggctggtgaccccaaagcaaggaggacctagtaacataattgtgcttcattatggtcctttcccggccttctctctcacacatacacagagcccctaccaggaccagacagctctcagagcaaccctagccccattacctcttccctttccagaggacctgaaaaacgtgttcccacccgaggtcgctgtgtttgagccatcagaagcagagatctcccacacccaaaaggccacactggtatgcctggccacaggcttctaccccgaccacgtggagctgagctggtgggtgaatgggaaggaggtgcacagtggggtcagcacagacccgcagcccctcaaggagcagcccgccctcaatgactccagatactgcctgagcagccgcctgagggtctcggccaccttctggcagaacccccgcaaccacttccgctgtcaagtccagttctacgggctctcggagaatgacgagtggacccaggatagggccaaacccgtcacccagatcgtcagcgccgaggcctggggtagagcaggtgagtggggcctggggagatgcctggaggagattaggtgagaccagctaccagggaaaatggaaagatccaggtagcggacaagactagatccagaagaaagccagagtggacaaggtgggatgatcaaggttcacagggtcagcaaagcacggtgtgcacttcccccaccaagaagcatagaggctgaatggagcacctcaagctcattcttccttcagatcctgacaccttagagctaagctttcaagtctccctgaggaccagccatacagctcagcatctgagtggtgtgcatcccattctcttctggggtcctggtttcctaagatcatagtgaccacttcgctggcactggagcagcatgagggagacagaaccagggctatcaaaggaggctgactttgtactatctgatatgcatgtgtttgtggcctgtgagtctgtgatgtaaggctcaatgtccttacaaagcagcattctctcatccatttttcttcccctgttttctttcagactgtggcttcacctccggtaagtgagtctctcctttttctctctatctttcgccgtctctgctctcgaaccagggcatggagaatccacggacacaggggcgtgagggaggccagagccacctgtgcacaggtgcctacatgctctgttcttgtcaacagagtcttaccagcaaggggtcctgtctgccaccatcctctatgagatcttgctagggaaggccaccttgtatgccgtgctggtcagtgccctcgtgctgatggccatggtaaggaggagggtgggatagggcagatgatgggggcaggggatggaacatcacacatgggcataaaggaatctcagagccagagcacagcctaatatatcctatcacctcaatgaaaccataatgaagccagactggggagaaaatgcagggaatatcacagaatgcatcatgggaggatggagacaaccagcgagccctactcaaattaggcctcagagcccgcctcccctgccctactcctgctgtgccatagcccctgaaaccctgaaaatgttctctcttccacaggtcaagagaaaggattccagaggctagctccaaaaccatcccaggtcattcttcatcctcacccaggattctcctgtacctgctcccaatctgtgttcctaaaagtgattctcactctgcttctcatctcctacttacatgaatacttctctcttttttctgtttccctgaagattgagctcccaacccccaagtacgaaataggctaaaccaataaaaaatggtgtgttgggcctggttgcatttcaggagtgtctgtggagttctgctcatcactgacttatcttctgatttagggaaagcagcattcccttggacatctgaagtgacagccctctttctctccacccaatgctgctttctcctgttcatcctgatggaagtcctcaaacaccatttccatacccaggcattctgggtccccactggagggttagtctgaagggcaatggctgggctttggaaaaccagcaagatgaggacagagaggaaggcacacagcaaaccataagcccttacccagtgcaggacagaggatgcgggcagacctatgggttacaatgtctggtcatttcccaattccagattaaactgtcacctgttttacctttagttttattagtttgtagtcttaacacctccagcttctcttgtttcaggatttgggcttaaaattgagtgctactctgcatgtctagtttgaaatactagagaaggcagagttgagacaactgatatgtaaagcctggggaagagtgatttctcaggagcgagacacactaagtcaggagcaatgggatatagggcccagtgggggctgaagtgctatgttcagagtagcccttccaatgggcttcttcgtttgatggatggaaaccaaaccactccaaacacaaggtgttaactgctcctacttgggcaaagacagttatcctgtcaaggtaaattctgcatacaggctgaatgcattgtggtaaaacactacatggaggaagaggaggaatgggattaaagaaaaggaggcctagaacagtgagaggggctgagagaggccatgtcgaagttagttgaggaagactgtcaggggagagaagagaagtctgaaagcagagaaaggttgggaaagaggagggagccctttgttgagagcctgcttgcttcaggcctcaggctggacgctgctacctgtgctgtctgcatctgcacaatgatcccaggaacaggtattattttccccatgttatagatgtggaaactgaagattacagttcaaattacttatgagttgtgaaaccgtggcatgttctgctgaagatggcaattctggaaactttttccaagtagttaccaggatggtgggattgctcctggtatctgggtgatcctagagcagcttctcccaaactccaggcagggcccatggtaacacactgaagacaccttaatgccttggtgtctttgtttcccacggctgccgtaacaaagtaccactggtgggtttaaaacaataaaaacttattctctcacagttctggaggctaaagatacaacaccaagatgtcagcgggtcatcctgtatgacagctctaggggagaatcctttcctgcttcttcccatgtctgatggcttctggcactccttggcttgtgccagcatcgcagcaatctctgcctctgtcttcacatggcattttccctgtgtctctgcatttaagctcccctctcctttctcttttcaaggcatggtcttaggatttagggcccaccctaaatccagaacaattttattgagagatcttaacaaattatacctgccaagtccctatttccaaataaggtcacattctgagtttctgagtgggcatgaattctgggggaacactcttcttcccactacactggggatcttggaactggagaagagggttctctggtggcagcttgcaaagaccaggaaaggatgtgctcacagcagggatggggcccaggaaactcatcacatgccggtcatttccatcagtcgtaactatctctagactgctcaaaatgcagtatagtattttgttggctattgttgttacatatgtgctggtttgttttcatattggctaaaaaaaagcctaaaacaaaggggacaggctttaggccctagaccaacattcatgcttcccactccttagacctgcgtggaggcagcaggcatatccttgtggctcctcgcaaaggtaggacaggaggatgagcagccgagggaacaaggaagcacttcagagagagcagaactgtgggggccagagggcacaggctaggactggggatattggaggatagtggtttgtgtgggcagagctgtgaggggctgagcagctgtagtgcaagattagagtggaggtgggaagggggaaacaccttgtagaagaaagatagtgtctgttagtttgatggccatcatcttggggacgtggaaaacggaggcattagcaggtgggaggatgtgggaggagtttcttgttagtaccctagagtttgcaatcagacccaggtgaatgaattctcctctggaggataaaaggccatgtgaattttaccctctcagtccaggggacttgacagagatggagagagcttcaagctccatctggtcctcccaacaccctacttgacccagggcaggttcctcttcccaagtttttacagccatttccttgtctctctcaaacaacacccccaacattcagcacgcatgcactgggaagtgaatctcttctgcctctacctgcctttttctctagaatcgaagtggattcttctgggccaattctgggcatcctctccattcttcctcaggtaacactgagaaaagatgagttcgatgtagggcaatcatataacttactgtaagaattgagataccattgaaaatgaaaggggcccattagccacatgggatgctggaacaagaggagtaaaccaggaatggtcacaaggcccctccagtggagaggctctgagggagtttctgggtgcagcattattcctgcaaagggaggtactaaagggactccacaccaacctggacttgttgactgtttcaaacctcagggctgacctaagcatcatcctatgaagaaaccatgtggacagaatatagggcaaggcagggacaacagcatcctacacaggtgacacccagtgcagagcaaagcatgcttacttattgaaaagagttacaagaaaagcatctctggaagaatgtctagggtaccccaagttctcgctgaacttagcatggagtagctcttaaagagaagaacttcacctgtgacctttacagatttatttgggaaattggaagaaaaagggggtcatccaaatggttgcgtaataaaataacttctttgtgggggaaatgggattcccgtgagcatcccagagccccagtcaccatcacttcctgagaggaagaatcttcccatcagcaccagtatccatagagattttcctactactaggctcattgctgggccacataaggttggggagtggggatggtcgggagctgctgggacaatccaagagaaaaaggctttttctctctcgagggagtgatttcataataagagtttgagataagggcaatggatcctaatagatattaaagtctccatttccgtccctgagccatttcctcatttttcttctgtagtggcccagaaaggaggggtggagatagactgatatcagcccctaacagtctgtgtgacacacagccccaaatgtcctatataggagaatctttgtgaggtttctctggttataaatgaatgtgggaatggaatattggtgctttgagacctctgttgaagctgcatagtgaaaacaaaaatgagtttttgcttcttcctcaggtaacactgagcaaagatgtctagccatattttcatttaggggtgttgggagatgctggtggagatcacgggaatggctaaaacccagaggtgaactcagctttgccatggacccatgagtgaatccattttctgcttctctactgacatctcagactcatcaccaggttcacttttaccatgtcctagaaactcccctatgctatataagaagactcatagtatagaatggcatgaagcatggccaacagttttaatcacagttcatttccattgcttgtggcaaactcccatggctcccaaaaagctgatttctgaggcttgggaccccataacctaagactacccaacccacctagactcaaacacaacatattccctgccttattctagggttgaatgttctttcctcctatctggaagccttccttttcttgctgtctgtgtttgtgaatttgaagttcctgggttccttaacatccctacatctctgcctgtccttttattttttttattgtggcagaacttatgaatcatctccctccaacagacatgatattttctattcgccatccccctctcctatagactcaactacatgcctttctctcccatctctatccatagtctttatctctgctgctggtggactcctgagagggcttcttggggaatatggggccccaaaaatgagtgaatggcttctgtaggtcagcaaaaaggatctgaaaatgagcctacacctgtgactatttccaaaggatttttatcagcttgctctgcaactgatctcaactgccctctgtgaatatgagcatttaatccacacaacatgtaaagctaattctcagctcctttttgccaacctacagttgctattcacttatctctgggaccctatagtccccccaaaagccctctcaggtgtctacatgcaacagagtgcccatattctggcaagaacccataaatctatgcgagacagaatcattagaaactttaaaacttgagtttttggaatggaaaaaaagcatgtagtggatggatgaaaacattatcatagcaaagaagatgttgtaatgcagagacctgggtttaagccttagttctgtcatttatcaactatgtgaccctgggcaagtgatcacctctgagactcagttttccttgctgtaaaatgagctcaattacaagcccaacttcataagatcgttttatctcatttaacccacacaacatgtaaagcttttagaacaatatcagtaagtattaggtgttattataactactaccaacctgaagatttttttcaggcaaaacattttcagttttctcaattttgttattatagggcacagttttgagcacgtcctactttccatagcccaatcactcccttctgaaaacattaaagtttgtttttatccctctatcttttaaaaaatgtgttgtacaggacctgacccagcaccaggtgggttctgacctacaaagagtaaagggggaactttgcctcctctttctcaacatcttatacgttagttggttccattaggacaatttatctactttttgtacgctcaccatcccgttgactcacagagctcactttgactcaccccctgggtgttttttcacatatccttctttcacatattccccttcctgtgttcatatagatggttttctctgtttggtgggggaggagggagagagagaatgtttatcatgtttattcagcttatctctccaacctattaagattctgcaggattctaattttgtgattcattatatttatccttctatcctcatgccatctcagatatgatcatcttgcctgattcattactataagagtgattcatgaaattcatagcaagatcacagctcaacagagaccccacattccccaagccttgtctgaagtccaggagctgctaaaacacagagaattagcttctggtcctcctctggccccagctgcatggctctgaacaactcatttttattctctgggcttatatgtcctcctctgtgatatgaggacattgggtaaagtgatctctaagaatcttcaaactctgctcttcagattctctgattcaaagcctgcagtctctgaagtaccaagagaatgggaactcagagaagctaagctcttcctggcctcaaatcatacatatctgtgacatagtctcagacagtctgatggtggaagaggacagcactggcactggagtcccacagttagcaagagtcaactggagccctgacacctgttccctggccctcctccatcaaaaaggtctagggccatgaatgacaagaaaattgtgttaaaaaggagagtggccctgaatcaaaaggtgggaagtaatgagatggaaatcggggtcttttaggtaatagctgacaactggggtaggaatgggggttctgagcccagtgctggctgccgggctgtttatctctgagtcacatcagcaccaagccacagcagccacctgccctagctccatctcttacagtcacaacaggatgtggtttgacatttactgggtcctgcatctggggtgcctgtgaaagttgctccctccacccacccaccttcagagcatcatgagaaccacactcaccgcatccggcacccaaccccctcctatgctgctctttctacctgggcccctggttagcatcctggcagtagaaatagaacttcagaggggaggggcagggtctctagaggggaatctaggtatcccagatccatgtgcaggcctcccctcccccaacacatctttacacctgctggaggttatgcacaagatcaaaggccacagtgggcaccatgaagatagtggagaatgaaaaacagctgcaataactgctctgacccagttgggatcccttctggtcccacatcactcaggcaactctctcttcccacctgccccccaaactcccttccacctccctccacatgtatcctcccacttccttccactcatgtaatgagaggtgctgatgagtcacaggagaggtagccctagataaccaacagactgcaaaacggacagtccctggatgtctgagccagtgtttgtgcactgcattgactggctcctcgtagttttttcctgtagttgctaaagcctgtaaggtctgtgtgatgaatattttctaacacatcttagaagaacataatgcaagacagaatgaaaaactagagaggcagaaacccccaaagtaagtagtgggaaattaccaggtatataataggtcaagcctgctctgcaggagctcaagggattgtagcattcttatcccaaaccactgaatcctgggcaaaaataagaagtcgcctaattttagtattaccagcttcccaaccccgggcattcttcatcttactcaagctgtccagaggccccagggtgactccctataagtcccatgggtggctgagatctatttagaggcacaagggtatctccttataagtcccatgggtggctgagatctatgagaagcatcttggggagagtgcctctggccaccagcatgtggccctgaatcttccatgtgcaactggccagggaaggagatatatggaaatagtcatcctgcacatctgcaaaatcagatgcaaatcctggaagctctcctagaaaagagacagcctcatctgattaaaggggcaagtgagtttgatgaattattggcaagagacagcatgtctgaacaggatcggtcatcctaaactgctttcctttgtcccctggaattataatgactgtggatttctgagtcctagatggtatggaaacagttatgggaatgaacagtcttgcatgaataagagcagataacatggaggatgttaatttgttctgctgaatttaggtggctttcaagcctctccttcaatgctcacctgtctctaggatgctctgtgcaatgatcaggactttttttcttcagattctctaaaacttacaatattcacatagacctgcacatttctacacaaactgactctcctgcttgcaatgtcattttgcttatataactattagcctcctaaagagctaaacttagctacaattttatgtcctttgtgaagttttccagaatttttgcagtatattacaggaaggaaaaatctgcctcaagtctctactaattctacttgactagtggtgattgcctgagacatttctctattaatgaggattctgaagctgtataaagcccctacagaatcagcatctgaataggcacagcatagggttcaagtttcatggttttgccatccaagcatgtttagcattttaaatattaatatttattacatacttgtagtttatgatttgaaattttttaactaagtcttcctcttgggtaagttgtaatgaaaataatcttgtaagcttaaggagcggaaaataatacctgttgaaaattagagcttgtaatagggctttataaacaccatctcatttaatacacataacaattcaatgaggcaagttttataggtggggaaaaacttgaaacttagtaaaattaaataactaggtcaagttcataacaactagcaaatttttagactacaaaaatcaagtgctttgactaaatcatgctatgactgtgcccaacaccatctcgagtacattttatttttctttttaatcctcaaaatgactcactgtgtccagcaaataatagctgcttaatacataggtgatccttaaagttcagtagggacccctgggcattattccatatgttcttgatcactctgtgtctacatctcagattttccacttcagattaaatgatactagaaatatgcacgtgtctggattgatctaggttaaatgatgcccggaatggagtattttaagacatcttgtgcccccttgtggaggggaagggacattagaaagaaaatctttttaagaacaaggactagggagggatggggatgaggaaggaagctcagttgccaaggtaaccatcgaacctcttcccagccatccacatcagccttttcctctccttcatttccatccaagtgatttctcttttttagagctcaaccattacacacacggtcctcttcttgcgtatctcttggatcaccatctgtctgtctttgctacaaaggaagggctacaagatagtacaacaggacattttttaaaacctcaaacatcaccaaaatttctaagtgcaagtttatttttattttttttttttttgagacagagtctcgctctgtcacccaggctagagtgcagtggcatgatcttggctcactgcaacctccacctcccaggttcaagtgattctcttgcctcagcctcccaagtagctagtattacagacgcctgccaccacgcccggttaatttttgtacttttagtagagacaggtttcaccatattggccaggctggtctcaaactcctgacctcaggtgatcctcctgcctcagcctcccaaagtgctgggattacaggcatgagctaccacgtctggcctaagtgcatgttacctatactaacaaaaccacacttctgcctcgaatgagaacagtctcctgaacatcttgcctctttgcctgactcaaagcctcaggtctaagcctccccataatttctagtctcagcagaaagatcaatgacaggagactctccaggtgatgaaattaaccaattaagtaacctgggttggcatcctcccgtttgttcaccagctcacctcctgccacaggtatatcctttctctcagccatatatgcacaaaccccctccccacggcacacatagaagaatttggaagactagaaaatcaggcaaggtatagcacaccttgagggctggagtatggtagcctgggccgggacatccatacattgagaacttgactatgtgcaggcaaatcacaggttctgcacacatacaattttttgttctccctgagaacttagtagagtcttttgtagaattctcgctttattccattgctttcacattggccagcagtcagaaacctacttacaaatatcctccacccagtccctaagtgaaggcccctggggagtatggttagggctcaggagagggtggggtttttgcacagatgtctgccccacccagctcagtgtgacactccaggcacagagatagaagccagagtcactgagaaggagcttcttagaactcaggatgaactgccggtcctggggtctggaggctgagagattctggggcacctcagagctgatctggccaataccaacggagtagaagagcagctggaggcccctgcctgcagcctgtcggtaccagtataggttggggtttgatgttccctccacagtgcactccagagagagcgggctgcccacaggctgcaccagggtcgctggccattgatgaatagtctgagatctgacccctgtgggaaagataaagtgccatttacagaggagcaccccagcctggcttgccttccccagacagaggggcagctcaagctcttgcatgacacaggcacctggaatccatcatggggagtagactgggggagccaagatgcaaagcatccctgggccagggaagaccaacagaacgaactccttctcaggagatagagagaactaagaatcatcagatcagcccctaaggctaaattcccatatctgttccagacaatcaggaatagactcaagagtgtcaaaccaacagctcagactctgcattcacgggattggggtgagggtgaggatgagaaaagaggcttgccagagaggagggcacccaccaaagaaagtgcccaggagaagggcaaggagagagcagagcat

SEQ ID NO: 59 - DNA, 61294 bp, Homo sapiens
ttaggggcagaaaaacatttgtaataattaatggctttgagagacacaaggctttgtttgccccagagtattagttaacccacctagtgctcctaatcatacaatattaaggattgggagggacattcattgcctcactctctatttgtttcaccttctgtaaaattggtagaataatagtacccacttcatagcattgtatgatgattaaattggttaatatttttaaaatgcttagaacacagattgggcacataacagcaagcaccacatgtgtttataagataaattcctttgtgttgccttccgttaaagtttaaataagtaaataaataaataaatacttgcatgacattttgaagtctctctataacatctgagtaagtggcggctgcgacaatgctactggagttccagaatcgtgttggtgacaagattgttcaccagcatatggtgtggtgaaaactcactaatttggaattagttcagattattaagcctgaataggtgaaaatcctgaaatcaaggatctttggaactatttgaaatcagtattttatattttcctgttgtattcattaaagtgttgcaagtgttctatttgatggattaagtatatttaggatatacatgttcaatttgtgattttgtatacttaattggaacaagaaagctaataaaggttttgatatggacatctattcttttaagtaaacttcaatgaaaatatatgagtagagcatatagagatgtaaataatttgtggacacaccacagactgaaatagcaaatttaaaagaaattgttggaagaatcaagtgtttgtggaatgagtcctcctagtaaagttcctgctcttgtgaataattaagcctcatgtataattactatagcaaaaggaagcctaagaagtattagactctacttgtatttaaattacattttacataatttatgtgtatgaaaaatgttttaaatgcttattttcgtaagccatgagatagctcctttatattttaagaatttctgaattaatttgcttggattttattagtgcaaatggcagagctagcaattcctttttctgtgttcccattccatcctattcatccctcttttaggaaactctgaactctggattgtccttgtttacatacctgcctcctgcattggactatgtgtctctgagtgtagtatgactaattcatttgtttgtcaaggactctcaatgcatttgttgaacagcctaattagtaatgtctgcaacaatgacattttactgtatttaataaagctctgggaaagtaggatacacataagacaggtctaggtctaaattctttacagaaacttggatttttagttcggtttgaaatttgaagatgtgagtatatttatctcagtttcccaaaggacaagctaattggaattatcatcctctttcacttgattggatccccagaatgccatttacgcatgcagcaggattttataacagttttaaattctgtatatttgatgaagaggttttatatttttggattcaagcctctttttaaacttctacaatatggtttacaataattccttatatcctgcttttgaaatacatattacaactttttaagtttggaaggctatatttcaaggactgaagttacagtatactcaagtgatacacaagcctagcaccccactttccacatagtgttcgataaagattgataaactcgaaatcacagaccttttaattcttaagacaaatagcagcagaaagaaacatctttggcttatttctggtaaggtttttatgctctgtaaaacaaagaattgtattcatccgcgcagcacagattctattaaaaataaatgtgagagtcgttaatgtagtactgctcatttaccatcaaaattcacttttcaggaataatcccatcagtttaaattggatattggaatgagcattgattacatttaacttggtagcccaaaatttcttcatggggttttgaactcggcgggatttcaaaggttttaaaaatgagtttttgattttttttaaaaccctcaaatttcattacctttaaactaggtcgaaacggggcgcaagagattggattaacaccatagtaatacttattttgttcttaaccatttcagggcttcttgaaatagaggctgtatggtgtaatggaaaaaacagccttggaatctgggagcctgattcctggattcagtcccagttttgcgtgaccttgggcaagttactttacttctctgaatttccgtttcctcctctgcaaaatgaggatcgcaatagccaccttgcaaccttgactggagcgagcctcgcacaccccgcgccggcctggaggaagagcagccatgattacgccgccttcgctccgctacccgcttgcggctggcgccctcctccagcaggtgtaggcgctgccgcgctgccccacgcctttccgccgctcgcgggcctgcgcctcggcgtccccgaggaggccgctgcgggctgaggtagcgcaccggcctctcggcgtcccagtccggtcccgggcggagggaaagcgggcgacccacctccgaggcagaagccgaggcccggccccgccgagtgcggaggagcgcaggcagcccccgcccctcggccctccccccggccctcccggccctccctccgccccctccgccctcgcgcgccgcccgcccgggtcgccgcggggccgtggtgtacgtgcagagcgcgcagagcgagtggcgcccgtatgccctgcgctcctccacagcctgggccgggccgcccgggacgctgaggcggcggcggcggccgagggggccggtcttgcgctccccaggcccgcgcgcctgagcccaggttgccattcgccgcacaggccctattctctcagccctcggcggcgatgaggcgctgaggcggctgccggcgctgcgccggagcttaggactcggaagcggccgggccgagggcgtggggtgccggcctccctgaggcgagggtagcgggtgcatggcgcagtaacggcccctatctctctccccgctccccagcctcgggcgaggccgtccggccgctacccctcctgctcggccgccgcagtcgccgtcgccgccgccgccgccgccatggccaatgacagcggcgggcccggcgggccgagcccgagcgagcgagaccggcagtactgcgagctgtgcgggaagatggagaacctgctgcgctgcagccgctgccgcagctccttctactgctgcaaggagcaccagcgtcaggactggaagaagcacaagctcgtgtgccagggcagcgagggcgccctcggccacggagtgggcccacaccagcattccggccccgcgccgccggctgcagtgccgccgcccagggccggggcccgggagcccaggaaggcagcggcgcgccgggacaacgcctccggggacgcggccaagggaaaagtaaaggccaagcccccggccgacccagcggcggccgcgtcgccgtgtcgtgcggccgccggcggccagggctcggcggtggctgccgaagccgagcccggcaaggaggagccgccggcccgctcatcgctgttccaggagaaggcgaacctgtaccccccaagcaacacgcccggggatgcgctgagccccggcggcggcctgcggcccaacgggcagacgaagcccctgccggcgctgaagctggcgctcgagtacatcgtgccgtgcatgaacaagcacggcatctgtgtggtggacgacttcctcggcaaggagaccggacagcagatcggcgacgaggtgcgcgccctgcacgacaccgggaagttcacggacgggcagctggtcagccagaagagtgactcgtccaaggacatccgaggcgataagatcacctggatcgagggcaaggagcccggctgcgaaaccattgggctgctcatgagcagcatggacgacctgatacgccactgtaacgggaagctgggcagctacaaaatcaatggccggacgaaagtaagtgtgtgctgcgggtttgtgctggacaggcccttctcggcgggcagcccctgcctgcgactgaaactgcctaggctgagaagcagcattcctctatatagaagggactcgctctttcttgtgtagctccccgtaaggaagacggacagaatttgtagtagctgtttatctagttagcccctttgtatccactgttttccacttactgcccgttcacaaacttctccggctaattgcatggttttttgactcaacgtaggcgctttaactttcctattttcttttttccattccactattggtcacaattcaaaccttagtggcgttttagccacccagtgaaggggtgttagagtaccacccaaagcaagtcctggttctgcatctgccttgtgtttgcataagctgttaaatttcctatggtgtctgaaccactcatcacatttcgattgagagtcaaacgctgtgttcagttaggaatttgccggctgaccgcaaaaaggtacatttaaaataagcatttagtcgaaagactctgtattcaggaagagcttggctactcccctccccctgttatagctcttatccctcaccctgttcctactgttttgaaacccgttacaaaaaggggaaagaagtatttccgtcttcaggcctctcagtgtaggtaggctacatttttagcaccagtttcctttatttgctttgttaatgtaatccttctgttgaaaactgttttgtaacttcctggaaaacaaaacaaaacaaaacaacaacacggaattggcgcaggagggctcgttttatcctcccaatttggtgagatctttttgttttctctttactattgcggtttttcctccacagatttcttcacttcttacctagtctattccctctttcctccctcatgataaacagtagactctttcgtccttaaccaactctcttgcagctctttttcattttacttctcagatcttgatcttttctttgtggctgctcccaggccaccctcctccaccatcagtctctgattttgtgggttttgagagattgacctgggagagcatcacagttgcatgtttgtacacacacgctgactctaactagtggtttttctgtatgtgtgtgtcagatcatctactttgacagtcattacatgtgattctcaggctgcccgaaagactgaacataggcagtgagaaagttataaacgtgaacattttgtggggaaaaatacaatgtggagtctaatttacctattgccacttcattgctggatgaaggcacaagtcttaatttcttgtagtcttaaaaaggaacagttgaataatattaaactggaaggaaaagggggatctgatgaaatttcagcgttggtctttcactagattttcattgataaaatttttaagaaagttgtcagggcacaactttaagaaattgtcacatctgaacataaagtcctgagctccagagcaggaaagaaattagtttgagacaatagggctgtgaagactgaccaaagtatatagttgggacataagcttaaattggattcttgaagaagatgatgtcccaaatctttcttgatctgctttccttagttaatttagctttccaagttaagctgagacctcttttctcttttgtcttcctgctttcacctgtccttagagaagggacagcagacagcctggctcttagagcaaatgcttctcatagagatgctattaggaaataggtacctccttcctcaagagttctagttgttggggttttaagtcacgtaactgtacatattagcaggtaataagggacaggatgaaggagggatgacctttaaactctttggatttgatctgcttatattaattttagggacgcaacttcaggatctataaatgatattcaggaattcctttcattgtacttcttggctgaaagaggttttggtaatcgtgtttgaacatgtaatttattcctaaaaaacaagggtgtttgctttgtggaaatgagaaggcaatcaaaataaccacccaccgtatattgagcaaccaaccacagtgtgttaggcatcatattaggatcaatacagatacaatcagagtatttttttttttttttttggagacagggtcttgctttgttgccctggctggagtacaagggtgtaagcatggcccactgcagcttccacctcctggactcaagctatcctgccatctcagcttccgagtagctgggactgtaggcacacaccaccatacttggccaaatgaaaaaaaattttttttgtagagtcagggtcttgctgatcatttgatctcgaactcctcggctcaggggatcctcctgccttgtcctcccaaagtactgtggttacagacttgaaccacctcacctggccacaataatcttaattctgtgaagtgagtagtgttattcctaatttacatttgagggattttcagctcagacttggcagaggtctaccacttactataaccctggctggtgttcaaacttaagtcattcagatatcaaacccatgctcttttttaactacgctagttataggtagaacattaaatgagatgtagattatttagcacactgctggaactgcaatttgatacatatattttgttgaaagtgggtgaatagcactagctttatatgtgagtaatcatactctatggttgggctgtgtaaaactttttattaggtgactgtacaatgtttatttcagatagtggcttaaaagccacttttgtatttatccacctgaattatgcgcctgtcagtatactgttaacagatgtcagaatatggtttttttatgtgattgcagagggagacttcaattcagaattttatccttcataacattatagtgattttaaaagttatatgcagcaaatgtgtagtatttttctcatttcaactttcacagcagtaggcaggtggttgtatccctttttttatagattagaaaagtgggactcaggaaaagttagttcacttgttggaaattctgcagcatattaggacttaaattcaggttttctgactaagaatctgatgttcttttttatttacatcatgtatattgcatgctctttatgtcagggcatggtaatcagatgatacatgatagtctgtggcccattcagtgtaggctttgttttcccctgaatttctacttcaaacatgcttatctggccgctgtttatgcaactactttaaaaaaggaaccataagggaaaaatgaagtcatacaggagaaaaacagaaatgtaattgtagccactgatacaaccaagctcctgtttccactttctctggtctttttgggattttctcctttttgccgttaccctgccctttgatcctatgtccttgcttatgcttgttttcatcaagaagagtctcaatgatatgcagtagaaagaaaccatggtctgctgttttgtgaagagtagtgtgccttgacttgggggtacaggaggaagaggaatgcagaggagtgaggatcatgggaaaatgttgaacttttctgttggagtttcttcgccactatgaaggaaaacattttcccattaaaatagaaatactagaatcatatacataacatttttggaatttaatccaaaacttcatctgttccgttaaaacatacataaagaaaaggagtaataaaataggttgggactaataagcagcagattatattactaagatttttcactattactgtagttaattagttaggtctggctgattatggcttttagagcaaagaataggatgaggaaaatgcagctgttttattatcactaacagagatgtggtgaacaatcctcttagatgttaaaaacgaaactgacccaggaagagagccctcatcagtaccagaccatgctggcatcctgatctcagactttcagcttgtagaactgtgagaaaataaacttatgttatttaaacctaaatacataagtacacctttatctcctttttccattctctttgtatgcttgggatccaggatacacaaattgaagttacttgtttaatgattttataactatgtcagaatttaagttaaaagtgagttactctgtatgtagaaaggctgaaaatagtacaactgcagtaattctgtcagctataagggacgtgtggactgagagggtagtcttaatagattgtgatcaactatatgtgaaaacattttgtgtagtgagttgatgtgtagtttacatgtaaactaactcctttagttcgaaaggaattttattttacgttaaaagattattttaggctgggctttagtggctcacgcctataatcccagcattttgaggggctgaggcaggaggatcgcttgagcccaggagttcaagactggcttgggcaaatggtgagactttgtctctaaaaaaattaaaaaattagccaggcatggtggtgcgagcccatggtctcaggtgggatgattgcttgagcccaggtgatagaacaaaaccctatctcaaaaaaaaaaaaaaaattttttttttgtatgtatgtaactctttacttatctactacctaataatccacaaaaatacccacaaatccttaattacgtggaggaggaggagatgataatagagatcattttaactttgaaagataatggattccgggccagatgtggtaactcacccctgtaattcccaacactctgggaggctgaggtgggacgatagcttgagtccaggaattcaagaccagcctgggcaacatggcaatacctcatctctattaaaaaaaaaattattaagaaagaaaggggccaggtgcggtggctcacgcctgttaccccagcactttgggaggctgaggcgggtggatcacaaggtcgagggattgagaccatcctggccaaccaacatggtgaaaccctgtctttactaaaaatacaaaaataagctgggtgtagtgttgcatgccttttagtcccagctacttgggaggctgaggtaggagaatcgcttgaacccggcaggcagagattgcagtgagccgggattgtgccactgcactccagcccgggcgacagagcgagactccgtctcaaaaaaaaaaaaaagaaagataatggatttggttctgccattagatctgggttggatcctgggtctgctatggtttctgtatccttagtccagtttcttaatttcttgagtcgtcagttgctccgtttataaaatggtgttcagtgatacctgtgtttttagcttctcaggcttgttgtgaggtgaacatataatgtttcatgtaaagcaccttttagatggtaaagcgctatgcagaactgttcttaactattacttctcccatttaaaaaatttgctatctttctgattcttttaagaattctgtgctttccctgtctcattcccctccgataaactggagaaaaaagggcttagaatgatcacccatttttttacctaaccacttttcctgcatttacacatttttttttaaaagagaagaaataacatttttttaagagaaaaaagtcccagagagattaacttcttcaaggtcatagagctggtgacaaaatcaacagacctttgatttagttcattcatatctgtaactttatacatatttctacttaactaattttggcatattttacgcttttttttttttttttttaaaggacagggcctaacatgcccaggctggagtgcagtggtgcaattatggcttactgcagcctccagctcctgggctcaaacaatcctcccacttgagtctccgtagtagctgggactacaggcatgtgtcaccacacctggataatttcttaaatttttttgtagagacgggatctcgttatgttgtctaggctggtctagaactgttggcctcaaatgatcctcctgccttggtctcccaaagtgctggctcatgcctgtaatcctagcactttgggaggccagggtgggcggatttgcttgagcccaggagttccagaccagggggcaacgtggtgaaacccatctctaaaaacaatacaaaaattaaccaggcatggtggcacatgtctgtagtcccagcttcttgaggggctgaggtgggaggatcgcttgagcctgggaggtagaggttgcagtgagctgtgattgcaccactgcacttcatccagcctgggtgacagcgagagcctgtctcaaaaaaaaaaaaaaaaaagtgctgggattacaggtatgagccatcgcactgggcctctgccatttttgagaatatgcttgaacattcgagactttcttctcccttttgcttctgtcattctacatgttggcttatctgacattctagtttaaatttttctcctacctaattttcttaaatgttctttatccatctgtctttcctctgatactatttaaagccgtttgccctgaagtaggcctaccctctcttgtttctttagtaggagctgtcttcccactctgtgtttctgagtgacagtttactcctgttttcctttcccttttctctcccatcaggcttgaaatctttgttcttcttccatgttttctgaagcctgtgcctttctgatatgcctttggattgatgttgtcagcttagttgtttttgtttaatttttcactttaggcctttaaagctaccccaactatttcagtctcccttttattctagcacattcttgggcagtttctttttcttagattttacttctgtgcttacattccaccttcttttccactgtgccctcgtttccacacttggaacattgtctgtgactacatgatggcattcagataatttactaagtccattttcagagcttgtctttgccttttatttcagctaaatctcttctaaaaaaaaattgatatagatggttaaccaaaatcttctcttacaacagtttatttcatgccttatttcgtagtcaaaactcaacttttctgccacctttgtacttcataatcacatttttccataaccaattcagaattagtttcatttctgaagagcttggacagtgtctgttgacttgagatccccataaagttttcatgagtttggaattctcttttttcttattcagtgttccaggtcccatttctttaccaaagcaaaatacgtgtactctttaccctttgttatattttctgagtcctgttttgatactattttcactcatttgttcattcaacaaatgttgagtaccctgcacatacaggccctgttctaggagctagggtgtcctgaataacaacaaaaagccccccttctcatggaccttatcttctagttggaggaagtgtggggtggggagggacagtcaataaacagatgtacaagtaatacatggcacgttaggtggtaaatattaagatggagaataagataaggacagagtgactagggagtactcttttagataagattggtaaaataaggtgacatttaaatagtgacttgaatgaagtgggaaattagttatgtggatatgtggaagaggagcattttcaggaatggtattaaatagcaaatacagaggccctaacttgaaatgtgtttggtgtgttcagaaaacagcaagcacggcactttgggaggtcgaggtgggcggatcacttgaggtcaggagttcgagaccagcctggccaacatggtgaaacctcacctctactaaaaatacaaaaattagccaggcgtgatgacatccgcctgtagtcccagctactctggaggctgaggcaggagaattacttgaacccaggaggtggagcttgcagtgagccaagatgatgccaccgcactccaacctgggcagcagcgtgagactctgtctcaaaaaaagaaacagaaaacagcaaggaaaccactgtggttttagtggaaggagtaaaggatatgtgattgatgtagtaggataggaaatgagatcagtttgtgtaggatatattctggatatattttgaaagtagaatcaaatgagatttgctgatacattagatgtggggtatgaaagaatggaagagtcatgaatgacttaaagggttttggcttgagcgattggaaggaaattattgttttattttgacctaagtcttctgcttttcttctcttgcccccactttttcagtgttgccatttatgatagcttgctgacacttacttcccagccaagcaacaagaaaaaagttatatgttctatattttcacattccttcaaattggctgtgctagctactactactgttgaccttctagccccatcctttcttctctagaggttttaaggtttctctgtgcagtatgcttgtatcagctctaccagtggaaccgccttcaggaattattgcaggaaaccttgcaacacttttagtgttgtctataagtatgtctgtgcttccttgcatgaaccactcattcaagatggcttgtgaatccacgtaaaaagaaatatacgaagtttgaactttaggggaacattagagaaaattgaatggttcaacataagggaagcatagatttagattcaatgtcaaaatgaagtcagaaataaaacatcttcatttaaacctactgttgaaaataaaactgttacagaaaattgggaagaatggaattaccgtaaaatatcaaaaatagttccactgacttatcaatacatgactgtatgatacacatgactatatgatagcttcctaaagtagtgaagaagaagaaagttactgatagcttagggactgtattggatgatctgtgaagatatcagtgttgtatgagcctttcatccctttgatgtggagcctggcattggaattgcaaataaaagtaccaaatataaaataatactggtactattaaaattagaatatactatccaggccttttttttttttttttttttttttttttttttttttttgagatggagtctcactctgtcacccaggctgtagtgcaatggcgtggtcttggttcactgcaacctctgcctgcaacctctgccttctgggttcaagtgattctcctccctcagcctcctgagtagctgggactacaggtgcccaccaccacacctggctaatttttttgtatgtttagtagagacagggtttcattatgttggccgggctgatcttgaactcctgacctcgtgatccgcccacctaggcctcccaaagtgctgggattacaggcatgagccactgtgcccggcctactatccaggacttttgagcataggaagccttgcttttgattctaaagtgagagagggtcacaaaagtatgggtaaacattagattgtcaggtatgaaataatttttaaaaattaaaaccagaaacatgaaacatgaactccagaacccaggaagctgtaatctcatctcaattcagtttaaggctaatttttatgtaataacaccttaataggaaatgtcaaatctaagaagtaaattgaaaaggactaatcataagtttggggaataaaaagattgaccattgtgtttgtctgttttcacactgctgtgaagacctgagactgggtaatttataaagaaaagcagtttaattgactcacagttccacatggctggggaggcctcaggaaacttacaattatggcagaaggcaaaagggaagcaaggcatgtcttacgtgacagaaggaggcggggagaattgtcaaacacttttaacataagatctcatgagaactcactatcatgagaacagcatgagggaaactgtcaccatgatccagtcacctcccaccaggtccctcccctgacaatggggattataattcaatatgagatttgggtgaggagacagagccaaaccatattaaccatctctctgaattttttcttattaatattgatatttccaattttcctctataaatggtgactaggagcttggcttctatagttttgttatataattaccctttaattctatctcaaggcatattttacctgtgtgatgtcttctaccaatttctgttaggtctactctgaaatggatgccttgaaaattgctttttagctaaaaaatttagtgattccccgccccccaccccttagaccagatatttttactgctgcaatagctctattaaccaccccacctttaaaatctttggctacccatttactagcctgggtcttatcctttcagttgttttttcttatatttttcagttttctttttttcctcaacttacaatggtagttttttttcctaaagttcagttcactttctgttcatgactgtcagaagatgtgtatgtagaaggaacttgaacatctatatttctagatttttcttcttagtttgtagtagtcatttattgctacataacagattactccaaagtttagcagcttaaaacaacacacatttgttatgtcatactttctgtagacaaggaattgggcacagtctagctacatcttctgcctcactatttctcacaggctgcagtcaggacattggtcagggtgtgtggtctccttctaaggcttgaatggggagggatctgcttctagcctcactcagtggttattggcaccattaagttcttggcaggttgttggactgagggcttcagtttcttgccacgtgggcttccctaacatgacagctttcttcaataaagtatgcaagccaaaaaggcaatagtgtctgctggcaagactgaagtcccagtcttgtaatctgatgatggaagtgacatcccatcacttgtgctgtattcttttgcaagaagcaagtcattaggtgactttccattccatatgtgtgaggaatcatacaagaatataaataccagttcttacgtcagttcttccttggcagtgtctgccccttaaatgttactattctttatgatctgtggtttgtcttctctttttttccctctagtctacactttttttccccctgggttatcttatgcgctcatggaagcacaagttcttaaactagtttgcctgtgttgaagctcttctgctacttaattgctctctgattttagacacattttctaacctaaagcattaatttcctcatcagtatgataggagttaataacagtacttaatccaataggtctatttgaggacaggtgagaaaataaagaaatactcaacagataatcagtgctcaattagtattagctgtaactgtaacaaataatagtaataacaacaatcatgacttcagctattaggatttgttaaagattccttcgtctgtctcttactttggcatctgtagaggactgacagacatttctacctgaattttctggaagtattgcaaactcaatgtgattaagactgaagtttcctcttgttggaaggaatgaggattggtaagcctgtctgatgggggagatggaggaacagatttaaaattgatcctgtgaacttcatttagttattcaacagctatttactgagtgtctgatctgtgttaggcactgaaggtaccacagtgcccaggtcaaagtaattctctctgcctttctggagtcttaactgtgtgagggaaatacaatgttgaacctgtaattcccagtgctatgtttatgagatggaagtacaggatcctattgggatcacacaagaggagacctaacttggtctgcaggccaggagaggtttttttttgtttttttttttttttaagaaattaggctaagacttctaaaggttaagttggagttaagtctattgaaagtctccaagtctggaaacagcatgatgttttagaagaacatactttcctttatcagtttgaaaattttgcttatttaaaactaatttcctattagtctcttgttcctcattcccatttacactcttcattgctgtcctggattattacaaaagcctgtttgtttgttttttttctttttgtatctttctagttcattctgtccattgctacttttttataaagaacatttcactaccatatactttctgttccagccacaggaacctgtttgcaggtccctgaacctaccttcattttctagtgctgtgcatttcctcatttctttcgtttggaaagtggtgagaaggtcctctaacttgcttcttgccctcatttctctaagcagagctacaactttgtcctgtctgttcctctggcacttcccatcaccgtgatagcatacttcactgtggctggtttccattcccatttcctctactatagtgagccacttgaggcgagaacccttgtatttccaacattggtgtactcagcatcttgcgtcgaggactcagtaagtattatatttgaattcccactgcaccgctctaattagaattttaaaaatcactttctatctggattgttacacactttttttccccttaattcatttttctccatgtactacccatatgcatcctatataaatttaccaacactcataaaaatcttactcagaaatcttcagaggtttgctaaggatacaatttgattcttacacatttaatgctcaccagctgcttaggcccacaccatttatccaccctgatttgctactgctctttgaaatacaaccagtgtttcagccagactgttttcctgcttctgctccccttctcctcctcccagcacatctgtgaattctttgactggtttaccactcccacactcctccccagcaatgcagatcttctacaccctttaggatctaagctaagtctgcttcccagatatcctcccgaactctgaatgtcctttgatctctcttttctcaaaaaccttttataccttttattcccaaattatcttctctagaaatctgtaagggcaggggaaggaaaggttttatactattctgtcttcggcagaggacttttattattgcttgttacgtacagtattagtcatatcttgctaacactcagtgaactgccctcagctgatcctctgccctgtacctcacctctgctttaccacctttccatccgatttctaaaactgtagtgggactttttaaaaagtgtgtgagagttttaatcctgttgtggtaaactcgcctttctttgcttgctatactgtttctagtccctattttccagataaaaatagcccaggtcagcatggcttgcactatttttaactccaggtactaggagaaaggtttgctctaaaggtgaaatgaagttttatgacgttgcttaggccaaaagtcagttgatgaggttatgaactgcaatagaactttacacatccatgaatctaatggagagggcctgcatatcttatgtccctcacccctaccaatggtgtgtgaatccttcaaaacaaaacagcataatagacataatgttgaaagtgacttctttatataccctttttataagacctagaagaaaaaagcttgtagctagaaagcagatgcaaagttcaacattgataccacgttgatgtgcagagtaaaattttcaagagcaaaattttaagcttctaaaattatcatggatttgatttggttttcgaactgtaatttactcaaaatgtcaattacgtggaaggaggtttaagagttgtatttaacaaaagagggcatgagttaattaagttgagaaatatttcttttatgatgagaaaaccttttggccttaaccacatttctagattcaaggatttaatcaacgtgggagaagcagttgctttaactagattaaaagagggccatggtggagtgtagataaatagaaatctggcagtgtaaaggtcatttgaatctggttttctcacacattcaaacatttttatccttaaaacaaaaatggcagtttgacctgccagttttgcttagttttgatgcttaaaatgtatttttattctctgattacagagttggtaaggaaagtagcctaagaaatatttaccacagatgatttatgtgcaaagagtggttgtagttttgggtggttacaacccaaagtattttggaataaaatgtcttgaataaagaaattttgggctaaaggtcatgtgtgataataaaataacacccttttccgatagcttagaagttttttccaaggcggtcatataagctagcgtctcacaactttgttttgctgctggacccctttcagaatctagtgggagcggtgcactttctcacactcaaaatgaacatagtacacacaatgttctgcttgtaataaagcccctccatagaccctatgttaaaaaccccgttagagttccaaaaaaccataccaaaactaaacatttttaagcatttcatatcacgttatggtagaataaggtttctgtgtgtgttcagttcttgctccctccctgcctttagaactatggtttgagtttcttttcccccataaataatggtatgtatatcctatggacttctggaagatatatgccttatacagtctggctatagaacaaaacaaagttaaccggtatataccaggatggaaactaccatatagtgataatgtcttctctggagggcatacctctccagacacatttgctaggttaattcttgctttagaattctagatgtgcagttgtaccataaaagactgagagtctttatcactaataattaacactggcttatgattctctttttcctcttgtccttttaaccctgtcctgtcccctgctcccactgcctctgttctcgtttgttttgcatttttgtttttccttgtaactggcatttcagtagtattaacctgaaattttttttttttttgagacggagtctctctggctctgtcgcccaggctggactgcagtggtgcaatcttggctcactgcaagttccgcctcccgggttcatgccattctcctgcctcagcctacctgaattaaaaaaaaaaaaaaaaaaagccttagtaatagtagtgctccgcggctggggaattgggtgggggtggggggtggggggtgcttactaactaaaatgaaactagaattcatactagtttttttatattaaaatagtttctataatggttagatctgaaacatctctggatagttttggtagaaagtatctgcagaatatggaagaataatttgttcgtattgacaattttcaggaactatgctttgatgttgcatagtagctgtaagctttttctttaatgtgtgcctactctagagattcttggtgtttcttcctcttagaattgtctggggaaagggagaacagtagtgtggggtggggaagatgtttgtggacagaagccaggaatgggaataggacctgctagtattgccttggattcttgtcatctggctctctactactgagcaaggcactcaacaactctgccagtctctccatctatgaaatgggagtaatgctgacctaattaacagaagagttgttgagtagatgattatttgtaaaagactttttaaaaaagtagttatattggctgggcatggtggctcacacctgtaatcccagcgctttgggaggctgaggtgggcggatcacgaggtcaggagatcgagaccatcctggctaacatggtaaaaccctgtctctactaaaaatacaaaaaaagccgggcatggtggcgggcacctgtagcctgtagtcccagctactcaggagactgaggcaggagaatggcgtgaacccgggaggcggagcttgcagtgaggccagatagcgccaccgcactccagcctgggcgacagaacaagactccgtctcaaaaaaataataaatataaataaaataaaaagtagttttatttctcagcagtgccttttcagattaggacttggtcttagttgcccttaactctgttcttggtgttggttaacattgtcatcagaagttcagattcaattttagattcagaattcttgacttggttttactgggatgtcagaaccttatttttaattaaagcgaatctattgttgcttaggcagttggcacatagatttggcactgtgagaaaggaaatagtgttcagttgataagggcatcttgaactgaatttcagatagttgtgttacttaatgggtaatgaaataactccagctgaggaacaccttgattaaaaaatctttctctcctcatgccttctccgttagcagattgaagtcaagtggcaatattttatttataatcatgaatttaattatttaagctatattaaaaaaattgaaacccttagatgttaattaattttaaaaactagtgatggatgcaggtaagctagaatgattggatcaaatctcacacacaaatgagtttattctttaaaaaaaaattttttttttagagacggggtcttgctatgttgcccaggatggtcttgaactcatgacctcaagcaatcctcctgcctcaccctcctgaatagctgggattacaggcatgagccactgtgcctggccttattttacaggtcttactgacgtaagcccatatttgatttgttttacagtttgttgatattgcttagtatttcttttatttactgtatagtctataacttaataggtagcagtaaaaacaaaataataaaagttatttattttcctcctaaaataatggggggtatttatggcttatttacccttaataatgtcttttaagtggccattataaaatatgtagaattactttggtgtctgtgctgtcaaatttggctcatgtagtaattgtgctcgtagtaaaaagtgtattttaagcagcctgtgttgtccttaagaaatttcatgtaggttccacacttttttctaaaattaattattcttaacatttttaacagtcaaaacttgaaaccattaagatgtgaactgctgtatgtattataatagggagtagcttttttagtgttgacattgtataaaattagttatttacaaagatagtaaagcttattgtttgaaaataaggaattgaggaaatgaagttaaacaacatgtattcatacctatgtttttcttatagaaatatataatatctaggtatgtagaaatgtaaacactttgaattatacaatactttgaataatttaataacaatatagcttaaatacttgtagtgttatcttttcagtttgggaattgcatatatattttaactgtaaaaatctttttttttttttttttttttttttgagatggagtctggctctgttgaccatgctggagtgcagtggctcactgcaacctccacctcttcccaggttcaagcgattctcctgcctcagcctcccaagtagctgagtgccaagtacaggcacgcaccactgggcctggctaatttttgtatttttagtagagacagggtttcgccatgttagccaggctggtcttgaactcccaacctcaggtgatccacctcccttggcctctgaaagttctgggatagcaagcatgagccactgcacccagcctgtaaaaatcttacatgtcatgggaaagaggctgctgctttgtttatgactttatatagtttctgattataaaaataatacagtgctccaaagtagatgaagcaaaatctgatagaaatgaaaggcacaatcaacaaattacaattatagctggaaatttcaatacttctttctcagtaattcttaaataggaaatcaacaaggatataaaagattctaacactatcaaccaatttgacctgattgacatctgtagaatattccttgcattaacagcataaaatacgttatttgcaagtacatatgagacatttaccaaggtacaacaggtgctaggccataaagcaggtcttaataacttaaggattgaaatcatacagagtatattctctaaccactatgaaattaaattagaaatcagtaataaaatgaaattttgaaaatctcatatgtggaaattaaacagcgaatttctaaataacctatgggtcaaagaagaaatagatgtagagcaatggtacagggtgaagagttcagaaatagacctacactaacaatatcaattgattttttttttttaataaagatactaaggaaattcagtactggctaggtttttgttcttttttttttcttctgtaaatggttttggaatacatggctatctatgtggaaaaaataaaccttgacccttatgtcccaccatttataaaaattaattcaaaatggatcactgacctaaatgtaagacctaggctgtgtgcagtggctcatgcttgtaatcccagaactttgggaggccgaggccggcagatcacttgaggtcaggggttccagaccagcctggccaacatggtgaaaccctgtctctactaaaaatacaaaaattagttggatgtggtggcgtgcacctgtaatcccagctactcgggagggtgaagcaggagaatggcttgaacctgggaggcagaggttgcaatgagctgagatcgcaccactgcacttcagtctcagtgacagagtgagactccatctcaaaaaaaaaaaaaaagtaagacctaaatccataaaactttaaaagaaaacatcagagaaaaatccttgtgacctcaagataagcaaatattttttaggacataaaaaagatgagccataaaagaaaaacactgataaattagaccatgtcaacattaaaacgttttgcttatccaaagataccattaagaaaatgaaaagacaaacccttttgagagaaaatatttacaagcatattcaacagaagacttgtatcagaatgtctaaagaatgtattaataagaagaagagaaacaacccaaaagaaaaataggcagaaaaattgaacagctttttcacaaaagaagatacaggaatggccaagtgcatgaaaagattctcaacatcattggttaccagaaaaattaaaaattaaaaccacaatgagatgccactatacatacactagaatggctaaaattaaatatattgatgataccaagttttggcaaggacatggaacatgtgcaatcctcatacattcattacttgtggaaatacaaaatggtacagccactttggaaaacgggttagccatttctcataaagttaagtataaatttatcatatgacccaggaattccactcctaagtatctatcaagagaagtgaaaacacgttcatacaaagacttgaatatttttattcattatcaccaaaaataggaaacaacccaaatgtccatcatctggtgagtaaacagagtgtgcttcatcatacaatgagatactatttagcagtaaaatgaagtgaactagtcttttatgcagcaacttcagatgaatctcagaaacatcatgctgagttaaaaattgtaacataaattatttagctcttcatggttgaagtttgtactatttgtaatttttttctgtcacaaataatctgatgccaacaatgcattagatattcttaaagatgtatctctgtacattttaacaaggtttttgtaagaaaaatttctagactataattgctgggctagtgaacatttttatttgcttatattgccaacatttattgaatgcttattgtgtaccaagcactattaggtgctctttctacccagattacctcatttaattatcatagcaaccatatgaggtgcaggtcattactattttcctcattctataattgaggtaactgaggcacagagagatttaaaaacttgttccaaatcacacagctagaaagttaggtaaaccaggatagtttgattctagagcttaacttcctagctaagacatgtgaagttaagtttctatgcatcttttgaggggtgttgtatttattttcaggtctcctacttgatctcactgtatgcattacagaaatttcttgtttatttatttgtttattttgagatagggtctcactctgttgcccaggctggagtgcagaggctcgatctcttagctcattgcaacttccaccttctgggctgaaatgatcctcccatctcagctcctgagtagctgtgaatccagatgtgcaccagcatgcctggctaatttttgtattatttgtagagatggggtttcaccatgttgcccaggctggtcttgaactcctgacctcaagcaatctacccgcctcagcttcccaaagtgctgggattacaggcgtgagccaccagacatggcctctcaattttaaaaggttaggatgagccaaatatttattaaatgagtctttcccttattgaagtaatttcagaaatgcaccattggaatgttgtttaatttcaacaggtacaaactcacactcaaggaaaaacccagccattcactcaaaggaacattattttgatagtattcagatatcgtatacaaatcttttgagcaggttagttttttcatgtaaatcataacatatggtattggtcaagtagtaaagttcatattaaccttaaacatttactaagatactgttttcaagtaactcaggcaatgtatgcagagggtgtcatagtttctgtaagtatataagttttggatcaagatcacattaatgccagggccccactacagatcttctgaatcagagattctgaatctgaggtgaagactcatagctccttaaaattccatggagaaaatatatatatacctactattttcccacgaaaataaaaaatttaaagacaatttcctggagattctaattcacatttgggtctgagaattcttgtgtagggcatactctccattgttaaaggatactaaaaagttacatcctatatctcagatacccaaaggacatttattaagtcttatatacacctctcacaacctataagcttgcaaagcaaaaaggccttctaataccccaaattggtttatattttcttgatagttttaaccctatagattaatattctcttacctttttccccaaggcttctaaaagtagatgatactatctgtctttatgtgatagttgcttgtttgttaacttctttatgacatgtgccttcaagtgatgttctaaaactaaacttttgaaagttgttattccccttgtaaaagggtctgcccttttccctctcctgtgtttttctccttaaccatttcgtagtgcccacaggtagcgtggtatatattggtcaagaatgtaggatgcaaaggggggttgcctagatttaaaacccagctctgccattggctggttgtatgatgctagcaagttatctgccttctcatatttatttcatgggatagtaatagtacttatgtcatgattattgagagaagtaaatgagctaatatatgtaaagcactgtacctggcacatagccattaaaattaccacctgcttctactcgcctctcccctgttggctttattctcctctgttggcttacatgatactgtactgccatggctttctgtgatctcttgaaccattccttctttgctggtttcctttcttctcactaactataaatagtatttctctctggttttggtgtcaacattcttctctatatgtaataaggattataggcctgtcaggtagactggggtttgaattctacccctgccacatattagctgtatgaccttggaattttaaatttcctcaatcctttccaaacttagatttctaatctgtaaaataggggtaattcctttatagcaggattgttgggaggattagagataatataaagtgcccagtatagggtctgaaacactgtagttgctgagtaatgggatctgctgctcctgctgtcttttctagcttattgatctcatccacttctgtatcttcagataccgtcactgaactgttgatgcctaactctatttctctagttagatttccttcttgcactgttaaggtgtatttcaaactgccattaaatgttttctgtatgtcttattggcattttagagttttcacacttaatatcagactaatcctaccctattatcttccttctgaaacctgctgtttatcatgtgttccatatttttactcatgttcttgatctccttttaggcatggtaccttagcattgaattgattcattcattgtctttgagtctgtttctggttcctctctgcgttctcacaccaaggctcaaatatccatcttttgcttcagttctcactactatagttaaaccctcactttatcgtgtgtgtattttttcccccagtagccgtgaatgtcatctccctacctccattattctttgttttccccaatctgttctttacattcatctttctctcttatcagatccatcttcccagagtggatattaggagattctttaccccaaagagtcaaatagtagatagtttgggctttgtgagccttgccgtccttgttgcaactgtttaactctgctgttgtaacaggaaagcagccatagaaatacgtgaccacgtaagtgtgactgtgttccaataaaactttatttacaaaaatgggtggtggtctgggcatggtggtatgcacctatagtcccagctacttgggaggctgaggcagaagaattgctttatcccaggagttcaaagccagcctggacaacataatgtgacccccatctctttaaaaaaaagaaaaagatgttggactagacttggcccacaggccatagtttgctgacccttcccttcctacctttctttctttctttccttttaaattaccattccttctagtatttcttgaactaattatctttttgagatattgactgcaaggtagaatgaacttttagctccctattttcctactgtcatctaaaatatttcggttttaagtgttttggttctcatcatttggagaagtacaaattatgcaattacaaagattccagaaataattctcatagcatttgccctgaatagtagttcctgactctttcttagatgctactaggtgcatgtgttatcaatacagtcctatatactgtggttctttggggaggtagctttaggtctgatgggcttatcagtttcttcagaacctgctttgacctctgtgtagtagtattccatttcatctgtcttatctcagcctttcagatttcactgactgatgaaggaacatttctatttggcccctgtatatttctccttagggtttaggtgcattctgtatcagctttgtggacactttccttatgtgcccttggagatcttcttgcaacattctaatttattaagttaaatatttttgaataccttctgtagaactgtgctgaagacataaagacaaaacacagttctagccttaacaatcctcatgttttgatgcaggggtcaggtgactcccaaagggccagatcataaatattttaggctgtgggctacatggtctctgttgcaactactcaactctgctattgtaatttgaaagtagccatagacagtagattgagcttgactgtgttccagtaaaattttatttacaaaaatcagtggtaggccatatttggcctgcaggctatagtttgtcaatccctggtctagtggcattgtgccaagggatatttgaagccacaggtaaccagtgtgtcttccttgaacgtaattttactcagttattgtggagaaaaagttaagtagtttgatttatattgatttaaaacattcttttaataacataagtggccacccaaggaatagaatataaaatcaagatgactatttaaaatgaaacagccttgcaagaaatgtcttgtttgtagcgaacctcttagatctgtaactacaaactcttctgccatttgttggataagcttgagaagcactgctaggcattgggagctatggaaggatttagaggagggcagtgacatcagattttaattttagaaaactaacttgaatggagtgtggagaatagtttggagaagggcatggcaattctggagggagggagatagataagaagactgttaacaggaattgaagcaaaagataagagcttcttttaagatgtaggtattggaggtagagagagttatacagattagagacatagcaagaaggtttgatttgattgattgtgtagggcaagggaaatggagaaggatgagtcaaggatgatagttctaagtttccgtagggagactggttgaacaaggatgccactcagtaaaggaaataatacatgaagaagagtaatgtgaaggccagggaagacagacaaataaattgctttggaactgttaagtttgctttgcttgtggacatccagatggaaattggttttatatgacttaaggctctggagagcaacctcgacttactggggtgggcatgagattgaatgtaattctccagaggaaaagttgtctatagcaagggtatttgctcatgacagaagccaatgaggggccgggctcggtggctcacacctgtaatcccagcactttgggaggctgagggaggtggatctcaaggccaaaagatcgagaccatcctggccaacatggtgaaaccccgtctctactaaaagtacaaaaattagctgggcttggtggcgcgtgcctgtggtcccagctgcttgggaggctgaggcaggagaatcgcttgaacctaggaggcagaggttgcagtgagccgagatcctgccactgcattccagcctggcaacagagcgagactccccaatctcaaaaaagaaaaaaaaaaaaagaagccagtgaggaaaaaacaaaaactgcctgggtcagtagaggaagggggtggggatgtgtattgaaagaaaaggaagaaaaccagaagacgggggtgttttagagaccaagaaataatagaggttcaagaagatgaatagtaccaaacactatagagagggttaattaggattggaactaaaagacatttattgccttttttttttttctttttaaaggagtggggtaatttgggacttttcctggggtaatttcactggagttgtgggagcaaagtcagaaagcggtgcgttgggtgtgagtggtatgtgagaaaacgtaagcagggaccttagaccagcacttctggtctacattaatgtgtctatgagtcactgggagatcacttggagatcttgttaaagtggagattctgaatcagtaggtctggcatggatgcccagattctacatttccaacaacctcccaagcaatggggatgctgccgttctgacagccacctgaactcagtatcccaaattgttcatcgatgtatcccagagcactgtagctaacttgcaagggtgccatggaatatttttaaatttcaagggaaatacactggcgtcattagattgctgtattagatcactgcattcctttcagtgatgtcatacctttgggaagctggattttcagtgcttgctctgataaaaagcaagtactgcctgaaaatcagtgtggaacaggaaatgaggctgtcagtgttcaatctgagtccagagtttgaaaagtatgcagtgcccaacaggcatccagtttttagaacttaaaatacttactaagtggtttggctcttactgcttaacggaggcaactacagttgttagatacttcttttggccgaggtttaccctgcaagatcactgagacactaaagattctttgagccaagaaagtttggaaccgttgacataggacttcttcatagaaacttgtctgtggagccaaagagagcctagatgattgggcggtagctaaaagaggaacaaaggagcatttattttaaaataaaagagacagatatgttgtatgttgggggagggagcagctgataaagaagcaacaaatgttgacttagagtaaaagatctctgaggaggtgagaaaggatggaatctgttttctctaaatattgctcccaaaccaacactggtttgttggaagacatgaagaacgttattccccactccagacctcctgaatcagaatatgcattttaacactatccctaggtgatttgtatgcatattaaaatttcagaggcactataggaggcaggattggccttatataggagaaagaatgtctcttccttttatttattccatcactatattgtgtactttcccgcatcctagccattctgattgagggaaatgagatgacaagggttatttatttagataaatttagaaatctgggggtgaaaagttgaggaagtttttgcttgtttgccttaattatctcaggtaagtacatagaaaatatctccatctagtgaataagaaaattgggactggccaggcgtggtggcttatgcatgtaatcccagcacttggggaggctgaggcaggtggattatgaggtcaggaaatcgagaccatcctggctaacacggtgaaaccccgtctctactaaaaatacaaaaaaaaaaaaaaaaattagtcgggcgtggtggcgggcgcctgtagtcccagctactcgggaggctgaggcaggagaatggcgtgaacctgggaggtggagcttgcagtgagccgagattgcgccactgcactccaacctgggcaacagagcgagactccgtctcaaaaaaaaaaaaaaggaaaattgggactaaaataatggctgagagaggtgagcaatggagatttgaaataaccattttgaggaacatcaacaaacctgaccagaaatacagaaattgccaaggagttctgaaggtccaggtgaggtcagagacaacttttagtggtgtcaatctgcataattataactttttccagtggtgctagtagcttgggtgtgggaactgcaataaattggattagtctacgtttgttgatttgcagcttgaggttaatgaaaaaataagctagcaaaaatctatcctgaatatgaaaagaaatgaagccacaaggaggatgagatgagaaaaaggagtagaaggattggagttctccttgcaagccaatgaaaaggctacatatcctgaagttggaagaatcctgcccttgtttttatccacagggagaggaaaattctttcctgtcaggctgcagatatttaacagggctttgtgactgattagataacaggaaagaagtttcagtctaggatgactcctactgttctgatattaaaacctactgggaacatagttaataattgatgataaattggcctccagtgagcatttttttttctgaaagggaaaggcagagggtgtgatgaggaagcatggaggcaggatgagatttggaaatgttgaatttgaggttggataggagagtatgtaggtaaagatggctgtttataccactggaaacagggacatggaatataagaggtcagatacaaagatcagcttgggattcagtgatataataatagcctctattgattgttcattgttatgaagaagactgagcagtttatattgtcatttatcctctcatcaaccctttgaggcaggtattaagccattttacagatgaagaagtaggattagacacatgcccagggccacgcagctagtaattgttagaaacaagattaggaactagatctctccgattccaaatccatgcccttctaagctctactatattttaggtcaccagcttctggctcttgattgatacctgacgtgttatagagcttctcagatgcaaataaccgaaacaaaacaaaaatctttcaaatgagcttaagcaaaccagaacaaaatgtattggtccttacctatgggtctgctgattgactggcagagttggaaccaagggctcaaacaatattatcaaaacttgatctctcagcttttcttttctatattagttattctcttgtaagctccctgatatgacaacaagatggccctaatagtttcagcattacatcatggagatacatacagaaagagagctgctctttaccaagggctttgacaaaaatcctggagttgcctctgattggcttaggccctttgcccatttctgaaccaacttctggccaggcttgagccacatgtccaccctggagggtagagagtgaacctcacctaggggtgagaactgaggactacaggtcaggctttcccaagtaaatgaggcacctggaaagagaagaaggggaatggatgccaggcaaacaaaagctgcttgtccacacgtggacagggatgaaaaatctcacctgtgactgcttgaggatgaagataaagattatgagactgtcagtaatgatgaaaataagtgacatttgttagatgcttactaggtaccaggtgctatgctagtcttttacatgtattctattgtttatcctcaccataggtttttgaagtgtatactgtcattatttccaaatacagctaggaagtggtagagctgagatttgaattcaggctggacagctccatacctcaccctctctattaccaccataacattttacttgtaattttctcattgtagttttcacattttgtctagttacactggttgacagcatatagtgaatcagacagacctgggccaccaatttttctacatagtatgcttaataaataattgttaatatgacttaaatagcatttactttaagtattatagtggaaaatttttaaaattaagttcttagtttttctcttaaaatgttttgtgctttatttatttttattttattttattttattttttgagacagagtctcgctctgtcgcccaggctggagtgcagtggcgcgatctcggctaactgcaagctccacctcccaggttcacgccattctcctgcctcagcctcccaagtagctgggactacaggcgcccaccaccacatccggctaattttttgtatttttagtagagacggagtttcaccatgttagccaggatggtcttgatctcctgacctcgtgatccgcccgcctaggcctcccaaagcgctgggattacaggcgtgagccaccgcgcccagcctgtgctttatattttaatcttataagtggctttttatgtttagccactctggtcctagaactcttttgtttttttaaacttcttataccatacttgaatatgtaaaattctagttggattatttcatttttagtatatctgtagagattatggaaatatttttgttaatctttgtttagtctttgtaataatagtttcaaaatcttatctagtatttctataaacgcttttttataaaaagctaatagtgtgtttttaaggcttgtattttcaaaataatttattctgaggttgtcctgtttacttattcaaattggttattcacaaaaataaaaagatagtctcatgtgctcttatttttaagatgcgtattttaagcattaaaaccatatgttttgtaacagagtttgagtttttagactaataaaagttaccgagtaccattttattttggttttcatgatttggggctctgcggtgccaattatatttttttaatcctgtctgaaatgtctgatctgtgtcgtcataaaggaagcagtgcaggattggaaatcaggagacccctttttgtcctttgggattcccctctctaaagagtttgggccagacctttatgatcttttccacttttaaaattctagtgtttttattttaaatctctgctagatcagaagcactgccttatggatgtatagtcttagagctagattggaagatagcatagtccaggttccttattttaaagatataccagctgggcatggtggctcacacctgtaatcccaggacttggggaggccaagatgggaggatcacttgagcccatgagtttgagaccagcctgggcaacagaatgagttccctgtctcacacacacacacacacacacacacacacacacacacacacaaaaaaaaaacagaatgagttccctgtctcacacacacacgcgtcggtcgtggtgaatcagttcctgtctacacgcacactagccgggcatggtggcttgcgtctgtagtcccagctactcaggagactggggcaggagtattgcttgagctcaggagtttgacgttgcggtgagctatgatcacgccactgatctccagcctgggggacagagaccttgtctcttaaaaaaaaaaaaaattaataatagtaaagataatccaggcccaaatgatagcgtctaagatctcaccatcatttagaagtagtggagcaaggacaggcatttctgcctgtgctgccttatgctcttctttcctcaaaacggtattagcaacttgaagacagacaacattcatttatttgattaaaggaacatttattgaatcgcttcaatctatcaggcattttactaggcatgtggttagctgcaaagatgtgtacatgagggaatgtgcatatatggaggcccaaaactggaatatagagtccaacaaccttgggttcacagtctatctgaccacttaggagcatgacctcagttaagttagccattctaagccgcatttctttgtctacaaaatgagaataatagtagtagacatttacacagttgtggtgaggattgagactataaagattaaacttagcatagtacgtggcacatagtagactctcttagagtttatgaaagaaggaaggaattaagacttatggaacattttcctgtattgtcttatttgattcatacccctgtgaggtagatagtgataccctaatttttcaagtgaggaaacagcgctgaaggcttgggacttccccaaggtccacagccattagtcatacctaccatacacattatttttaaaaagtgcaccagacactgttttaagcatttttatgtactagtttattagctttgcatgtggtatactattgttattttcacttaacagacaagggtagttaggtacagagaagttgaataatttgcccaaagtaacacagtcagtaagtggcagagtcgtgtgcttcatgtgcaggaaatctggcttcagagtcccactgttcttttgttgttgttgttgtttgtttgtttgtttgttttcagagagcatcttgctgtattgccaggctggagtacagtggcgctatctcagttcactgcaacctctgcctcccgggttcaagtgatcctcctgcctcagcctcccaagtagctggggctacaggcgcttgccaccacacccagctgattttttgtatttgtagtagagatggggtttcaccatgttgggcaggatggtctcaatctcttgacctcgtgacccgcctgcctcggccccccaaagtgctgggattacaggcgtgagccaccgcacccggtcagagccccactgttcttaatctttgtgttcttccttttacttcatgctctcttttgtgaaggtgaaaagcagttttacaaactagaaggtgctacataagatgtggtatatttatctgacttggtccctgtactccagagattacagtccatgaggaatgtgtcttctccaggctaaacctactcatttattgccactgttactcgctggatattgctgtcactattttggccacttttctttaaaaaaaaattttttttcattttgtcaacgttcgccctctaatgtgtccccagaaatggatacaagcttcaaagatctctattctgccaagctgtcttaccctcattttatagtttactctgcaagatgagaataaaacctgccttccagggattgtaaagattaagtgaaagaataaatgtaaagttattaacacatagtaatttgtcagtaaatgctgctggttattacttctgtatagtatggttgatttttgccattttgaaagtaggatttatttttaactttattagaattcatcatgttgattcaattgagatcacattgaatcttctttcttttatttgtgatattggctacttttcccagctttgtatgagctgtatattttcctattgagaaaggttacattaataagattcctttatttgtgtgactcaaaatcattgataaaaatatagactagctaggctgggcgcggtggctcacgcctgtaatcctagcattttgggaggctgaggtgggcagatcgcctgaggttgggagtttgagaccagtctggccaacatggtgaaatcctgtctctattaaaaatataaaaattagctgggcgtggtggtgggcgcctgtagtcccagctgcttgggaggctgaggcaggagaatcgcttgaactcaggaggcggaggttgaagtgagctgagatcacgccattgcacttcagcctgggcgacagagagagacgccgtctcaaaacaacaacaacaacaacaaaaaaccaaaaaattaggtaggcatggtggtgcatgcctgtaatcccagctacttgggaggctgcggcaggggaattgtttgaaccagggaggtagaggttgcagtagccaagatcacgccactgccctccagcctgggcgacagagtgagactgagacagacagagagcgagacagagacagacactagctacaggctagagatagtagaacctcctggcaggctggcagagaggcctggatgtaggattcatagagaaactaactattaatgttagtttgcccagctcacatttcaccgtcttatcaaccacatatgtgagaatatttttcaagattttaaaaaatgtatctagttggttcttccctcttaattttcttacagttctctcaatttaattacaaatgtgaggcctccatcctctgtccttagacttcttgcaacattctctttaaattagtcatatcctttagcagtggtactcaatttttgttttatggcccatcaatcactttgcttagagtcactgggttctaacaccctctacaaccaaaataaacttcctcttttgtcaacaagacatttagatgtaatagtgtatagcaatctgtaaagatctgcctacagtagatttacatacaatgatattgatcagatgagcagggtagatcacttaacaggttcagcaaacattgtgacataaagattaagcctgggccaccagaaaactgtggatcaaagaaacaggtgactgaagaataggtgagaggcagaagagtggtatagatggatgttctggtgggtggtgggaacaagcatttgagagagagattggatattggtagttactgacagtatgcctgacagatattgatgggatgtaaggatatagagaacttgacttcttaatagttgttatgaaaatcttgtactcagtctgtttttctaaaccactcactaggtatacttaaacatccttaaaaataagttgcggccgggtgtggtggctcacgcctataatcccagcactttgggaggccgaggcgggcagatcatgaggtcaggagatcgagaccatcctggctaacacggcgaaaccccgtctctactaaaaatacaaaaaattagccggacgtggtggcaggcacctgtagtcccagctactcgggaggctgaggcaggagaatggcatgaacccgggaggtggagcttgcagtgagccgagatcaagccactgcactccagcctgggcgacagagcgagacgccgtcacaaaaaaaaaaaaaaaaattaaaaaaataggttgcatctagggccaaaataaaaacacatggtactgaatgaaaaccatctgtaggcataatttagtattctgtctttatttaattaggggggtgtgtgtgtgtgtgtgtgtatacatatatagcatgccggtgttattttgacatctcatgcaaatggcaagttgtcaaacttcaatttttttttttttgactagccacaggggctcacacctgtagtctcagtgctttgggaggctgaggcaggaggattgcgtgaggccaggagtttgagaccaccctgggcaacatagcgagacctcatctgtacaaaacattttaaaaaattagctgggtgtgatggtgcacacctgtagagctgttcaggaggctgaggcaggaggattactcccactcaggagtttgaggttgtagtgagctatgatccaagccactgcgccctagcctaagtgacagaatgagaccttgtgtctaaaatatatgtatatatatttttacaagctagcagtacttctatcaatctttagcaatggatggtaaaacccaccttctgttttaaaattgtattaaagatgtttatgttactcttctttatctgtctaatctatcatctctgttctctcaaggtaaatcattaattgatttattcagtagatatttgagtgcctgtgtttggcactaggagtacaagaataaataagagctggttcatcctctgttggagtctacagtctggttggggaaacccagaaaaaaaaatgagtgtgtttaggtgtggcaatatataaataattaagtaacttttctaagaatgatgtgaaaaaacaaataacattaaactaattcaaagtgataaaagtagaatgaggttaatgttagatgaaacagactcatcattattttctaagactggatcttgtccttacattaaccacactctcccgcagtggtatggatgcaaagattaaacacttcagctcttaaaacaagactagataaaattatttgtaaaatggagatagtcatttctctgaatacctcatggagttgttgcagaattgaaatgagataattatttgtaaatgctgtgaactagagttctatacaaatagaacttgtactctgatgaaagttgtgacttgaatctttgtccatcatgccacaaaaaaacttttcagaagtgtttggttatctgcctacaaagggagttacgctattattgaaaaaaaaaaccagccgggcatggtggttcgtgcctgtaattccagcactttgggaggccaaggcaggcagatcacttgagtccagaagtccgaggccagctgggcaacatagtaagtaagaccctgtctctataaaaaatttaaaaattagctagtctactcaggaggctgaggcaggagcccaggaggctgaggctgcattgagccatgatcacgccactgcactccagcaacagagcaagaccgtgtctcaggaaaacaaaaatagaaaaagaaaaaaatcagctcctttttattgcagttactgaattcttaagagcctgatttacatgttttctggccagtcttagcaacttactgctttatagctgtactacaaaaatggtgccactcagtcacctaccgaagtgaatgaaaacctctagtctgaatgtgtcacttctttgtttaaacctcttcagtggctccctgttacccactaaaacccaagttcatcattggggcttactaagcttttgggaaggggccagagctatgtccagccttacctgtcacattccttgactcacacgtcaggttcacccttgtttgcagtttacacagcatgtgtctacacacacaccatgaccttttctcttcctggaatatgccccctctccttccttacctggctaattcatactctttcaaaactcatttttcagatagtccttcctgatcccaaccttctccccagtgaagtagtcagcgcatggactggtcattttaattgtcatctgtgttggaatgatcagttttcctctctgttctactcacacttcctagcactatgccttacacataccctaactgaacatgttcaaaactgaactcctgatctctcccattgtccagactcaggctgcaccatatgctgtcttcatctgtttatggtaattacattttccctattgcttaaaccaaaaccttagagtcatcttcttttatatctcataccagtctttctggacatcttgctttattctgcctttaagatagtatgagtatcccagcacttcttaccacctccattgctaccactgtggtccaagtgatcgttgtaccacacctgatttatgcggtagccttctaactactcttctgccttccactcttgccagccttcagtctattttgcacatcaggacttggcagactttttatgtcaagggccagatggtaaaaaatttaggttttgtggcctgcacggtctctgtcatagctgctagaccggagttggggcacaaaagcagccatagagaatatgtaattgaatgaatgtggttgcattccaatacagctttacttataaaaacaggcagtgggctgtggtctgccagcccctgctctacatggcaaccagactacccagtgccttccggtgacttaatctttatagtgttctctaaaaccctccatgatgtgcgtccccaaccccttacctgtctgacttcatcttacgctgttgtctgctttcctccctcctctccagtcacactgaccctctttttcctcagatatgccaggcccattgccacctgattctttgcaccatttattccttctgcctggaacattcatttcttcttaaatgtcaacttctcagtcaggcctacctgaccaaccaccctataaataattacattctagcattatattccctattgcgtgtttttttttttcttcgtaatgcttgtcttctgccatttcttatattatgctatatattgacttaattttttctctttcttttcctgctagaataaatgttccctgaaggcagtaactttgtatcttttctattaagtagtgtatccccaagatctagaacagtgcctgacgtatagtaggtgctcagaaaatatttgttgaatgaacacatagtgtatatttttagggtttaattttttttaaatgagttctttctctctcgccagcaccatatcctttctgtttcacactcttactgttgctctaagctgccctgtcctttccattctcactcccctttattctgactctcatctattagcagtgtgtccataaccttttatttcgtggcatctgggccatcctctacaagtagattgagtgatgtttgtaaaatggaaaaatgattttattattcaaaactctttatttttgattttttgccaattacaatgaagtgcttgtttaaagtacaggatctcttatgaaggaataattgtcaagaaaaaaaagtacgggatctcaggcctcatgccatacctgataagtcataatttcaagcagagggcataagaatcatcataatttaggaagtaacccaagcgattcttactgaacacagttggccaacactggcctgtaaggtaaagttccccagtgagtcagtgagagcctttttgagctgcccctgcctgtctgtcctgccccatccctattgctccacactgcacttcatcttccaacagtttttctatttgcatttctctcaaggcaccatattgattctgtttttgcaaatattcttttccctgtacagaacagaatcttctactctggaaaacttctatttttgtctttcaaaattctgcacgtttgtcactttctctataaagtcttttctgatccccattcccgtgacaaagttaattatgtctttgctgtctgggtactttgtgtaagtaagactctgttctggtgtttattacactgtactgtgtgcctttgcataactgtttgcctgttgtgacctgacctgagccagtagttgtttacgggtattaggtttttattgagaggtactgctgttctttggaggctacagttaaatgagtgttacaaatctcttcccccagaaccgagcttctaaatggcatgttactgtgaaagcaaaactcacactgagttctgccacacacaaaaaaaatttattaggaagcaagcacaaaaatactgttttattaggtggataaaattcctactctctatgcttttagaacatctgacaagcacctttttttttttttttttttttttttttttgagacagagtttcgctctgttgcccaggctggaatgcagtggtgcgatgtcggctcactgcaccctccacctcccaggttcaagcgattctcctgcctcagcctcccgagtagctgggattacaggcgtgtgccaccccacctgggtgatttttgtatttttagtaaagatggggtttcaccatgttggccaggctggtctcaaacttctgacctcagatgatccacctgcctcggcctcccaaggtgctgggattaccggcttgagccaccatgcccggcctgccaagcaccttttatggaaggtttatttaaggcaaaaatgctagtgtgcttttaggattcagctgaacctaattggaatcaaataacagaattcctttatggggaactaacagaaccagcaggagtcataaggctcagggtacagtccctaatagtaggccattagattaactagattcatgtatatgttcatgtaagagcagtggtccctatacagtgtgtagccataacacctttcttgagtaccattcttctctaatactgtcataatttctaatatccactatgttaattactaaattctctggctttgagatgagataaggcttcttgagttgtctcactggagtagggtttttgattacaagctttcctcatttactgatgattatttatatccagtcttgggcttgcatgttaactaagtgctccaggatgaatgtcaggaacctctcactcatgtcctctagtccattaaaacaaataataattacactgtttgtgccaaaataacttaaggaatttaaatcgtaactcttctagaccctggaattgaaacagatgttttacttttaatctctgtatcctcatgcctagtgcagtacctgctcagtgagcctcaagaagtgccagaatgtatgtttgtaatgtcaagcagctaagtgttttgttctgtttgtatttttgtttttaatgccgaattgcagactcttccaacgaattatattaataatatagcaagtttgccatagctgtcagaatatctgtcttaacagtgatacttccttgcatgggctagaatgaggttgtataattccctgggtggggatcaagctgagacctgctcaggatccccagtctccttgtggagagaggttgctctgtcttcctcatgaagtttgcagtgggagtggtgtgtgtgatataaatacagagccctgcttgggaatctaagaaagagttgtgcagtgctggtaagattatagctgaggttaacaaattgtagatctctgttctgacagcagagctagacagctcaaaatataatgtgtttcaccagatgaatttcttatttgtaaagcataactttatcaattcttcactaaaagggaaatgaaagctcagagagtactaaggcatcatgacatatctctagattatactgtcgggagcatcatacttaagttgatttttaagtgtatatttaagtttttttaatcatgggctagaattagagcctaataaggaaagtagtttggtgttagattattaaacaattcataattcttgggccacttggagagtgatttggatcaatgctatttcttcttcaataatctttcattgtttttctgtatttttcatatttctatgaacatgggaagaatcttggatttttaaaaactttacattgataattaatataattatattctgccttcctgtaccgataataaaaactttgtattaacatactcttccacacaagcagagtaaaaaggttgaaattgttgttgtgtcatatgacagcggttaacaaccaaagagctcttaaaaatcagtagggggccaggtgtggtggctcacacctgtaatcccagtactttgtgaggccagagtgggaggatcacttgagaccagaagttcaagaccagcctgaacaacgtagtgagagcccatctctagaaaacattaaaaaattagccaggtgtggtagcgtgtacctgtactcccagctacttgggaggattgcttgatcccagatgttcaaagttgcagtgaaccatgatcacgccactgcactccagcctgggtgacagagtgagaccctgtctctaaaataataataataactcagtagggaaaagattaacccagtagaaaagtggataaaggatatgagcaagcagttgaagaattaaatggccaataaaatatgaaaaatgctgacttaaaaatataagatgtaattaaaacattagtaagataaatgttacctatcaaattgagctgttttcaaagattaaaacttactatgctgggttggcaaatggttaaaaagatgtgtgcactcatacaaagccagtaggaatataagctcatgcaataattctggagaacatttcagcaatcagaaagctttaagacctaataatttcacttatagtaatttaattttaggaaaatatcaaggatttacaaagattaagctccaaaactattgttgatcacaatattattataatagcatttttctaatttttaaggaaactatatgcccttatatgtctttttaaaatatatatatacctatcatttacacttagaaatgaattagtcaaaaaattagtcagaaatcatttataataagtcagcttttgaccactgagttgtttactgtgatcaagaaagcagcaaggcttaaggagttcttattcttttttttttttttttttttgagacggagtctcgctctgtcgcccaggcttgagtgcagtggcgcgatctccgctcactgcaagctccgcctcccgggttcacgccattcaaggagttcttattctaaatgactttatttcatgacaatctgttctctgttctcttctctctgtactcccttggcaatctgtggcaggcacacggcttcagctatcccatgcgaagatggctcctaaatttacatttccagtcatgacttttttttggagttccacacaagtttccaactgccctttgaacatccccacctggatggccttccagcatgacctgttttcttccgtatttgaactagatttttgtagacccccaaggtagtgatagtgatgtgtatgtgtgctttggaagtgggcagggaagagacttaaaaagatttaactgtagaactgaaaaataccatgtgcagtacagcaggttcttgaataacattattctgttcagtgtcgttttgttataatgttgatgagggataaagaatcaattcctggccgaggccaatgtctgtgtggagcatgcaagttctccccatgtctgcgaagttttcttcaggtgctccagtttcctcccacatcccaatgtgtgcatctttgggatgtggactgacgtatctgttatcttagtgtgagtgaatatgggtgtgtgtgagtgcaccttgcagtagaatggcgtcctgcccaaggctggctcccatctcgtgctttgagctcccaggataggccccagccacctgcaaccctaaaactggactaatggcataaataattaccttgtttttattaatctttcttaaatgtgtatatagctcacatttatttcaaggtttaccattagaagtgttttggtctttatttagaagtttggcaatgttttatgaccacaaatatgctgtagaaacttaagttggtttcattatacattgtttcacataaagtttccaagaacctatcgaggctattagtgaggacttactgtacatcttgacatgggagaattgggcattaggcatgagcatgtgccactgcagcaggtggtgggccgcttacgagtctggattaccaatttcatctgaactcttgggtggactatatacatgccttactggagcaaggaattgaagaagaatacagaaggaagttgtttttctctgcctcagttcatatcctgcctctgccatttagagtctctgaccttcggcaatttttttcttttcactccagtttagttttctggtctctaaaatggggggagaaattgtgcctacctaaggtttgctgtaaagaatgaccgaggtaatccatgcctggcctataagtgattagtaaatgttagctgtcagcctctacaaaaggcatagtgctatgtcaaagcatagtgctttgataatatagtttaataggataaattttcagatagtaaaccttttcccttcattcagggtaaaaataatagttctgtaacccatcaaagtttagttctctaagctttgtatccctgttttaaaataattcagctcaaaaaagaaaaataagtttcctggttcagcttcatattgaagccttctaatgctagaaataaatgtctctagattcctcagaggcattgcggacctcttccttccttttattctcagagtgaaaaacaaatttatgctgtttcctatcttaagaacattctcaatcagccaggcacggtgtctcacgcctgtagtcctagcactttgggaggccgaggcaggcagattgcttgagcccaggaggggaagaccagcgtgggcaacgtcgtgagaccttgtctctgaaaacgtaaaaaagaacatccttaatcatatatattttcatatcagaaaagaaaaaaatagtattgttttgttttgtttatgtataaataggtttttctcgatgggaaattgaaacatttaaagttggtgtctctataaggtggcaaattaggaatttacctcagaattatatagtggtggattgcattgtttctttttcaggctttctggtttatagggttatgttggtatttttcgtgttattctttttacaattataatcatgaactgctgcctttcctggggctggtattggcaagttaattgggttggcagatccatgcaggccctgtggagcactcatcccctctcccttcttcctttctcctcatttttcagtattcctgtcaccagagcagagcacaagggacctagggaatgccagataagactaaagtggtaatggccacttttaaataatacatttagatggtgataattgagctatactgggaattatagaacttaacacaattacattaaatttattaaaacttttcttcaaaacgtgagatttaaaacttttctttactctgccttttattttttcaaagaatcctcacttggaattcaaatactgtataggaaacagctaagcactgcctctagtttaaggttggggttaaaacctgcttgtttggcctcttctcatatcacttcattcccaattagtcccctacccctagatacctccctagggctccagggctctaaggaaagagtttagaagtgaataatacaaacagatccccggttgggggataatcctggtgccctcagttttgttctattctgggatgtctggctcattttgacagttatcgataaactcctctcctacccgatgcttgtaattaaaactgctctttcacctagtgtttccattttcatgtacagtgactccattcatttacttacctaggctgaaaaccccgtagtcattcttgactcttcttactctccactcattagcaaatcatgttggttttctgccttcagaatacaccccactttgctactctgggctcagcctctttggtttcttgcccggaaactttaatagctaacttagtcttctcttttcactctttgcttcctgcagtctagtacagtggttaattccatgggttctggaaccagattccctgtcatgtgactttgcgaatactaattagcctttctaaacctcagtttagaggaatgaggatgagaacagtgatactgtttacctcacatggttgtgtcagacaacttgttatgcacaaattacttagataggacatggcaaacagtaaatgtcccataaatgttaggtggtaagagatattgaggttgttgtggttgtttttattcatacagacttgaaactgatattctcaaaacattagtcagatacattctctgttggcttcctggcccttcttagcacaatatccaaaggccttcctgtggcttaccaagccctgcagctctaggttacctggttcctctctgatcacattggcccgtgctcgctgtgttccagccacactggcctgctgctctttcctgccttgttcagcctttgagcactcattttccctctgccacattgctctctcttcagagatttgcccaacttgccgctcccttcatttaagtctaaacccaaatgtcaaccactgttcaagaatatcatgtcatctttctctatatacctaatttttttcatatcttaagaaaatacaacttttcactacctaacattacattatatatctgtttattggctaattatgctgttagaccagatttcatagtacaatagtcccctcttatctgagggcaataccttccgagaccaagtggatgcctgaaactgtggatagtaccaaatcctaatatactatattttttcctgtacatacatacctataataaagcttaatttataaagtaagagattaacaacaacagtaaaataggacaattataacagtatgccagcatcgctactcttgcactttggagctgttattaaataaaataaggtttccttgaacacaagtaccacgacgattgctctgatgacctagaaggctactaaatgactaatgggtggatagcatctacagtgtggatatgctggacaaagggatgattcatcccaggcaaaacggggcaggactgcaaggtatttcagtgcactactcagaatggtgtgcaatttataaactgtttatttctggaattttctattaaattttttggactaagttgaccaaaggtaactgaaatcacagaaagcaaaacttcttataaggagggactatgtaaatgagtgcaagggaccttttctctttggttcatcgttttagccccagtgcctttcatatacatagtcgatgttcaagaggtatttgttaaatggatatatgggatgtgatggggtgagtgactgacaaatattttccccttccttctttacacaagagatgctgaagttaccagatagttggaaaggcccaaattaacttttttgagatgtagagttcaggtttcccccttctttcccatgaataacaatatattgtgtaattcatcataattacttcagttaaccacaaatggagtaattgcattgttaaattagtaccctcttacagttactattcaaggtaaacttctttcctgggtagctagtgacaagaaaatcatttgggctcatcatttattgagcacttaaacccactaagcccatgccacactcctggttgttaccaacctccagtgctgaaagaaggaacttgttaagtctgtctggaatcaggaaaaacagagacatatataatgttctccaaaaattctgctgcttataaagagcagtgaattcagagtgtctagggaaacaggatttttaaataaggatttaggtttaagatgcctcttagtttcttagggatgggaagtgagttttaaaaattagcatttttcttttaatatgatagtagaacaattcggttactgtttgataactttatactaattcattgactttattatatgaagaaataaaggacttcaagaatagctcataacaaaccgggtggcgtggtggctcaagcctgtaattccagcactttgggaggctgaggcaggaggatcacttgaggtcaggagtttaagaccagcttggccaacatggtgaaaccctgtatctactaaaaatacaaaaattagccgggcctggcagcatgcacctgtaatcccagctactcgggaggccgaggcaggagaatcgcttgaacctggaaggtggaggcagtgagctgagatcgtgccactgcactctagcctggtcaacagagcaagactctgtaaaaaaacaaacaaaaacaagaatagctcataaccttgaacgtctttgtttgttttcttcataattcctgagaattttttaaaaaataccattaccaatttcagttaattatcatgtacacctagaatatggaagttattttgtgctttttattttgggcctcttttctacctttaagcttaacatccaacagtcttctgaaccatatcttgttataatctgagcaaataattttctttctgattgaaagagggtaaacataagctaatttgtttagtcctttttttaaaaaaaaatcactgacactaaatgagttaatgtttggagtttagttgacctcctaaattatccctattacaacatagtaagacaccatatctacaaaaaatacaaaaattaaccagcctggtgacacgtgcttatagtcctagctacttaggaggctgaggtgggagaatcacctgagcccaggaggttgaggccgcagtgagccatgattgcatcactgcactcgaacctgagcaacagagccagaccctgtctcaaaaaaaaaaaaaattggtaccattcagagacagtgtcagatggggtgttgactgggttggttcacctatcagatggtaaagtaggtgttctgaggtgagctcaaggaagattgaaatctcccatggagcaggacaaaaacgtacttgatcttgattatctgtatttataaagattgtcaaagtaggaccaagaaatttttctgatctttggagttatcactgtgaagcagaattcaccagtccttgttcatcaacctatcttgtgttccctataaatgttaatgtagaatagccttatcttatctacaaaatattatttttattagaagaatctaagtgtaaatcagtagccaaaaatcagagatctgatttattagctgttctctctttttatttatacatggactttaataatcattattatcattattacaggccatggttgcttgttatccgggcaatggaacgggttatgtacgtcatgttgataatccaaatggagatggaagatgtgtgacatgtatatattatcttaataaagactgggatgccaaggtatgcaacttaattgagcatttatttttttcttacaggtgtctttttctcaaaagcattaagtttcatacttctgataagactgtcacagacacagttaaaaattttcctcttaaatttgtttcagtctcaggtattaggagtggatttttgtaaaatgaaacaaatactactctatgttatacaacatgatacctgtagttaacaacgtagtgttgtgcacttaaaaatttaagagggtagactccatgttcagtgttctaaacacacacacatacacacacacacacacacacacacacgcacacacgaggttaggggaagggaaacggaactttgagaggtgatggatatgtttattaccttggttgtggtgtgtcatgagggtgtgcgtatatatccaaactcatcaaattgtaaatgttaaagatatgcatttttgtatatcagttatacctcaaaaccatataaaaaagtactgatatatcttaaaaagtggattcatttattttcagatgttagagcacttatctaaaatctaacttttttagaaaggtgacctttattaaaatattttccttttaatagtttttagaaaaacatttctgagaacagttgttttataatggcttttgggggagattatctatggataattgttaaggattatttgctatgttattcttggcatttttgtaaaaatattatatggcattgagttgtttaattgaatattggaggcaggattcagtctttccctgattattaaaaaactggaagtttatcagtactgacaagccctgtaaaaccaattagaatgtacaatatatttaatctctcttgttttaaatatatatttccttaatattagcctgagtctcattaaatttaaatgatttttaaaaaatatgtcatatattactacactagagactgtacagactaattttttggttgattttttaaaatcttaagtataacattcaaatagaaaagtggcttgtatagttcagtggattttcacaaagtgaacatacctgtgtagccagggtgcctttttttgttgtttttaagtcaaataacctttaaaaaacctctttctctgcatcccccaaaacacacaaatggaaactgcctgagtcttaaatgtgcaaaaacctaatcctgccctaaaaagtgttttaagtttagaatatgctcacagtgcttcactaatctttctaaaacacactgatttaaagagttttctctgccctagtccaggttcaaaatggagctgacctttctgctgagtatatattgaggcatgtcaacaagcatggtttttctgttacagctttcaaagtttgaagtagagaaataaattttgtaattgaatttgagcccaaggcacaaaacagatgggtgtaactttagttaaaatttaaaaattgactttttttcagattttgtgaatagctagaaagctagaactgtgtttcatcagcttctaacttctagattttgttaggctttttctaggctgatcttataatttctataatacttagtcagggtcattaatgtgtaggttttaaattaggacataggcagagaaacgtccctagtgtttttgtgtgtagaatagaaattttccatgctagattgcactgaatatgtagtgtgtcagttgttctggatgctagggatgtagcagaaacggaattagccctggcagagcttaggatctattggaggatacagatcagaaagattgacagttacagatagttatgcaaagtgtcaagacagattgctatggagcacacaggagggccacctaattcagaggaggaagagtggaagtgtcaagtagccatttcacttaaaacattttcagcaggtcacctgtggtactcccaatgacttgagtcaaagggaagggagcaggaaaaaaggaaagaagacatgttctcagtttggaggttctttagatgtttgcatagtagcctggggaatcactctgaacaacactggaacctgaggaaggttggcaagggtatcaaagtagctagaatttaacttacctgacagtgagcctgataaaccttttctttaactatagattctaggtttaggctcaaacgccatgttgtcctgaccaggtgttagagtttctttaaattttaagagtctacctgcttaggagtgtagttattcaagagtaaggagctacttggttggttgggttttgcctatccccagatcgtaaaccccgcaaggacaaagtctgtctgcattattccctactctgcacccagagcccaccacagttcccagtgcgatttgatgcctagttggtgtttaggtaaataataatcctttatgggtagaatcaagtttcacaagcaggtagtcatctgtgcatcaggcccagtctggaaagggagagccacaggttctaatgaactatatgctgatggtgatggtgacgacgacaataatgatggtcataataaatgatgacactttctactgatatactgaattatttaagtaagaggtatttgtgactatcctattgtttattgaattttaaagtatggtaaactatttgacataatttatttctaataataattttgtcaaaatttcttgaaatctatctatttgaagggtgggttaagcaaatcattaacatacaaaaataaacgtttagtagttttaaaagctttcaagcatcattttaagacttttaaattcagataacattcttgtgtttcatcagatatttataaaaatccctaaaatggctggggacagtggctcacacctgtaataccagcactttgggaggccgaggtgggcagatcacctgaggtcaggagttcgagtccagcctggccaacatggtgaaaacccatctctactaaaaatgcaaaaattagctggacatggtggcgcatgcctgtaatcccagctactcgcgatgctgagacaggagaattgcttgaacctaggaggcggaggttgcagtgagctgagattgtgccactgcactccagcctgggtgacagcgagactccatctcaataaataaataaatatccctaaaataagaactaaatttgtccttgcatcagtgcatatacttttaaaattgcagctcatcttcatactttattgagacgtatttgtgaataatccaattaagacattgaaattgtctctttttttccccctaaatttaatcttgtagcatttttggttactcctgcttacatatttggctcttttcctaggtaagtggaggtatacttcgaatttttccagaaggcaaagcccagtttgctgacattgaacccaaatttgatagactgctgtttttctggtctgaccgtcgcaaccctcatgaagtacaaccagcatatgctacaaggtagtattccttttcagaaaaaattggtttagagtatggtaggacaggagggaatctgtagagtaaacgtgaaagctttctaatgagtattttcctgccaggtacttttcacagtcattttaatttgaataattgtataagatttatgttgcacagtcatctgaattcaaataattatataagactcattaacagttagtactaaatgtgtctttctttgcacagccactctgaagaaagggaagcacaggccttcccatctttctagcactctctccgtgctttgtgcatctcttaactactatccatgctttgatttttgtaagagtattttacttgggagagagaaagatcaagaaggaaaagggttttttaaaaggtggtgagggacaacataggaaaatggatacagagtagaaaaatcagaggtaaccagagagtagaagtgaagagaaaaacagaagaaagaaaagtagagaacaggttaccatgtgtgggagttaatgttagaaaaatgatcctattagctttacaaataatgagcatctgtttcattatactttttctacaaggtatttgcaacctattatatttagtgctttatttcaaatgcttttttaaaaaccatttatcctgactcaattaaaatgctctggctgtgaaaacaagatattgtagacattatcatgaaagtaaatatttgtagaaaaatagcacattaaaaaaaaatacttattttttattatggaaaggtcttggaacattctgatagtgagcttccggcattcatttgctgtatctggcttaggagatgctagggtggcaagaagaggcacaggcttagatgcgctgggtggagagttggctttagtaatgatggttgactctaacgacttgattatcagctgtgccttttttcttcctgccttctgaggtgtgttgcctgcatcctaattcacgtactgagtagcaagctaagcaggttgtagctggagattgtaagaaatcctgaatggaaaccaaagaaagactgtcacatcacatgatgtgcccttttcaatcccatgtctcttcccagtggcatcccagtgctgtctctgccccctgctgcttctgtaaagattttctgacacagtaactgcctcatagaccttcctttttatgaaatcctgagtttggtttggttacgtcctttttagatgaataaataacagatacttgggagtttatagtaaataaatgccagatggcatggaggctaagtgctacaggagttgaggaacgaaggtggtgctacattggagagacgggcaagtgcgctttgaagggagaggctcagctggcctaggtgaggagaggcaaggggtgcagtcgtgttagtaaagttctgggggaaaaggcgtagttgttcaagttaaggcatggaaaatcatgcgacgaaaaggattcttgaagtagaatcctattctgatcttatctagaatgggtgataaggctggaaagttagaatgacataaggtaagttgttgatccagatattagaattctgattgctaagtgactaaaagtttagggcatgggcaaaagatacataaaattatgtatctgagccctttcctatttccaaggccacccaaaagtagaagaagccacatggtaagaaaggtagtggaactctggaaagagcagagtctggtctggaagtcaggagacctccttagacctcagctctgtgattcaccagtggtggggtctgtaaacgtcaggctcccagttgtccaaactcccagactctttacttcaaaatacattatgtgatttttcattctgtcatattactggctgtatgtctgataaatgttgccttttcccctgtgtccactggccacaatccacaatatatttgaactaattgctatattctgcccaggaactggtgatttgtagcgtactttcacttcctatagcgtttatacattttccccattatttgtatcagaaagtatgtcttttgtagtatttaataaactagagatgcctcacttattggtggaatgaaatattctaagtcagattttcagaaaaatgaagtttagacaaagtttaaacacaaaacacagtataattgctttgattaaaatccttaaaaattcttagcataatttaactgtcaaggttataattgtaaacatccatcattactctttgctataatgtagtgatgtccccagagactgttgaaactgttagcctgcaatgccctgagtccttttatctgtttcttttctgttcttttagtacttgtgctattgataatgtgctttttctgtaacagccattcttttacccttttattgtctctctttttttttagagggaggctcactctgtcacctaggctggagtgcagtggcatgatctcggctcactgcaacctccgcctccccgggttcaagcgattctcctgcctctcagcctcctgagtagctagggctacaggcatgtgccaccatgcacggctaattttttttttcttttttttagtagagatggggtttcaccctattggccaggttggtctcgaagtcctgacttcatgatccacccacttcggcctcccgaagtgctgggattacaggcgtgagccactgtgcccggcctattgtctctttctgatctgcagttcccttgcaaaaaataagtagttgaaataagtattaagaaagtcacaaaaactcatcaacttcagacatcaattttagtctcccctggttactgtataaataagctgttaaatttatcctttgatatcattccagtttaggcataattttggcattacaagttttaatataccattgcagcaaaataccactttttccccgcagtgtgatcattcttatcctattctaaattttcttttaggtacgcaataactgtttggtattttgatgcagatgagagagcacgagctaaagtaaaatatctaacaggtaaacgtcatttggggccaggatatattggtacagaaataccctgcaatcaggtgatgctttcaggaaactcaagcatagtctttgttaacaccatgaatacttactttttgttttttatcagatttcttatttgcctcattttttaagaagacataagtcatcttcactgttatctttaaccaaaaaaattgtcaaaggatgtggaaaatttgaggcaaagaagtctgagtaaattattcacatacaaactgagttttctgtgattatccttttcagtcaaaggccacttaactctaggtaacggccatatggtttcctctcattcactccttaaattaataccctttccttttcaaatggatgtgctctaaacagtactctaggtcttccatgttaaatgtagacatgaagaaaattaatacaaagaattatgaattcaaatgccaaaatcagtaaatgacacagacatgtagattccatatctgctaatggtgtacataggtcagcactcttgtactgaacctgaagatcctttaattatgccagttccccttctcttccacttatggactgcctctccaagagcagggggtctgtttcccatctgatggaccacttaccttcttttctttaactctactttctatctccaaaaatccactgagtattcacattactgattagctgtgttttccagagccattgctaatcgcacgtcgaccttacataaaaatggaatattcatgcattttctatgtatttttaaagccattatttgtggcacaagctcagtgtgctttcagagacactgaacactctgttgaagaaactcaaatggcttttaaaataaaaagacaaaatcattatctctgtgtagaggatggttttatccttgaaggtttactatttgaaacctcatcacaatagaatgctgagggaagtttttggaagtacaagcgtgatagttctcagatgatgtttgcaaagttgaaatattgtccatactcttaggaattcagtggaatgcagtagcagaagctctctggtgcttagtgaatgaatgaaaattttttttttttttaccttgcaggtgaaaaaggtgtgagggttgaactcaataaaccttcagattcggtcggtaaagacgtcttctagagcctttgatccagcaataccccacttcacctacaatattgttaactatttgttaacttgtgaatacgaataaatgggataaagaaaaatagacaaccagttcgcattttaataaggaaacagaaacaactttttgtgttgcatcaaacagaagattttgactgctgtgactttgtactgcatgatcaacttcaaatctgtgattgcttacaggaggaagataagctactaattgaaaatggtttttacatctggatatgaaataagtgccctgtgtagaatttttttcattcttatattttgccagatctgttatctagctgagttcatttcatctctcccttttttatatcaagtttgaatttgggataatttttctatattaggtacaatttatctaaactgaattgagaaaaaattacagtattattcctcaaaataacatcaatctatttttgtaaacctgttcatactattaaattttgccctaaaagacctcttaataatgattgttgccagtgactgatgattaattttattttacttaaaataagaaaaggagcactttaattacaactgaaaaatcagattgttttgtagtccttccttacactaatttgaactgttaaagattgctgctttttttttgacattgtcaataacgaaacctaattgtaaaacagtcaccatttactaccaataacttttagttaatgttttacaaggaaaaagacacaagaagagtttaaatttttttgttttgttttgtttttttgagacagtcttgctctgttacccaggctggaggggagtggtgcattcttggctcactgcaacctccgcctcccaggttcaagcaatcctcccacctcagcctcccaactagctgggactgcaggcacacaccaccatgcctgactaatttttgtatgtttagtagagacggggttttgccatgttgcctaggctggggtttaagttaaattttttaaaaaactaaagtgactggcactaagtgaacttgagattatcctcagcttcaagttcctaagataagggctttcttaagctttcaggtgtatgtatcctctagatgtagacaataatgtcccatttctaagtcttttccttttgcttctccttaaattgattgtacttccaaatttgctgttatgtttttttcctaatactgtgatctatctgatctgcagacaagaaccttgtctctgttgaagagcatcaaggggagattatgtacacattgaaactgaagtgtggtgttactgacggaatgtgcagtaactcctcagatatctgttaaggcatttcccagatgtgatgccagccttcttacctgtactgaaagatgcttagcttagaaaaaaacaaaacagatgcaaaatcagataattttattttgtttcatgggttttcttatttactttttaaacaaggaaggaatattagaaaatcacacaaggcctcacatacatgttatttaaagaatgaattgggacggatgtcttagacttcactttcctaggctttttagcaaaacctaaagggtggtatccatattttgcgtgaattatgggtgtaagaccttgcccacttaggttttctatctctgtccttgatcttctttgccaaaatgtgagtatacagaaattttctgtatatttcaacttaagacatttttagcatctgtatagtttgtattcaatttgagaccttttctatgggaagctcagtaatttttattaaaagattgccattgctattcatgtaaaacatggaaaaaaattgtgtagtgaagccaacagtggacttaggatgggattgaatgttcagtatagtgatctcacttaggagaatttgcaggagaaagtgatagtttattgttttttcctcgcccatattcagttttgttctacttcctccccttccttccagatgataacatcacatctctacagtaagtgcctctgccagcccaacccaggagcgcaagttgtctttgccatctggtctatagtacagtgcgcggcgttaggccacaactcaaaagcattatcttttttagggttagtagaaattgttttatgttgatgggaggtttgtttgattgtcaaaatgtacagccacagccttttaatttgggagcccctgttgtcattcaaatgtgtacctctacagttgtaaaaagtattagattctactatctgtgggttgtgcttgccagacaggtcttaaattgtatattttttggaaaagtttatatactctcttaggaatcattgtgaaaagatcaagaaatcaggatggccatttatttaatatccattcatttcatgttagtgggactattaacttgtcaccaagcaggactctatttcaaacaaaatttaaaactgtttgtggcctatatgtgtttaatcctggttaaagataaagcttcataatgctgtttttattcaacacattaaccagctgtaaaacacagacctttatcaagagtaggcaaagattttcaggattcatatacagatagactataaagtcatgtaatttgaaaagcagtgtttcattatgaaagagctctcaagttgcttgtaaagctaatctaattaaaaagatgtataaatgttgttgaaacatta

SEQ ID NO: 60 - DNA, 9299 bp, Homo sapiens
acgtgcccaccgggcgaggcggggcggggcgtcgcgcgcggtgggggcggggtatggcgcgctgtgcggcgcagggcggctggcacaaacggcggcgccggggccggaggaaaaagctcggtgaggaggtcgcggggcgagaagggagcgggaggagactaagccggagccggggcgccggcgcgaaccgggcggggtgtgggggcgcgcgccggggcctgccggggcgaccccgggaagggggatgtgggtgcggcgcgggggaggggacgcgcgccggttacgttgggtgccggccgttgtgggggttggggtgggggcggggagcgcgcgccgggcggaggccgagtggagggggaggggagggggtccgagcggcccttaggccctgcccctgtcgcctactgcgctcagaaggggcctcagggcctgccccgggttgggggcgttggggtgccctggatgggggcacctttatctctcgtcctgtctccgggtgcgtgcaccctcctccgtcctttcctctgtcgccgcggaccctctccccgagggcccctcccgtcggtcagtctcgggacctcccttccgtctgggcgtgtgtccgcccccggccggcttcctcccgtcgggctcgggtcgaccccaccgtcccgctccgccccgggtcctccctcccagcttccctccggtctatttttctgtctctgggcccctcgttctctttgtttttggactccccagtttcctctgtcttttgacccccccgcccccaccctgactctccctggaacccccacgtttctcgttgtctttctggaacgccgaggcaggtccctcctattttccaaaccccctcctttcccactcctccacaccacccttttctactccagccctccttcttctgtctttggttaccgcgtcccacaacctgcaccacagtcctctgtcttagggtcatctacccagcccctggcctccagcctctccctatcactgcctcttatctgtcagcggactcccgcacctccagattctcagggtcctctccccgacttggcctcaggttttggggggcctctatagtcaagtctgtcctggtcgtcttccccactcctgcccataccatcccggctttcccctgcctgcctgtctctagtttctctcacatccctttttttttttcctttctctagccaccctgaagggtcccttcccaagcccttagggaccgcagaggacttggggaccagcaagcaacccccagggcacgagaagagctcttgctgtctgccctgcctcaccctgccccacgccaggcccggtggcccccagctgcatcaagtggaggcggaggaggaggcggaggagggtggcaccatgggcccgggcggtgccctccatgcccgggggatgaagacactgctgccatggacagcccgtgccagccgcagcccctaagtcaggctctccctcagttaccagggtcttcgtcagagcccttggagcctgagcctggccgggccaggatgggagtggagagttacctgccctgtcccctgctcccctcctaccactgtccaggagtgcctagtgaggcctcggcagggagtgggacccccagagccacagccacctctaccactgccagccctcttcgggacggttttggcgggcaggatggtggtgagctgcggccgctgcagagtgaaggcgctgcagcgctggtcaccaaggggtgccagcgattggcagcccagggcgcacggcctgaggcccccaaacggaaatgggccgaggatggtggggatgccccttcacccagcaaacggccctgggccaggcaagagaaccaggaggcagagcgggagggtggcatgagctgcagctgcagcagtggcagtggtgaggccagtgctgggctgatggaggaggcgctgccctctgcgcccgagcgcctggccctggactatatcgtgccctgcatgcggtactacggcatctgcgtcaaggacagcttcctgggggcagcactgggcggtcgcgtgctggccgaggtggaggccctcaaacggggtgggcgcctgcgagacgggcagctagtgagccagagggcgatcccgccgcgcagcatccgtggggaccagattgcctgggtggaaggccatgaaccaggctgtcgaagcattggtgccctcatggcccatgtggacgccgtcatccgccactgcgcagggcggctgggcagctatgtcatcaacgggcgcaccaaggtaaggctaggtgggggcctctttggaggggctttgcagcaccctggtttgcagcattcagtgctctgagcacagtgggtttggagacaggcttctgggaggtcacagaaggtttaggcagttcagtggagtgggtatgcttacttgtggggacttgggggggtctttatcctccctacgggccttaatgtgtgcacctgataagctaggagtttgtcctggagccacagtggttcttttttttttttttttttttttcttttctttttttattgatcattcttgggtgtttctcgcagagggggatttggcagggtcacaggacaatagtggagggaaggtcagcagataaacaagtgaacagaggtctctggttttcctaggcagaggaccctgcggccttctgcgtgtttgtgtccctgggtacttgagattagggagtggtgatgactcttaacgagcatgctgccttcaagcatcgccacagtggttcttgactttgccaggaaccctcttaaactcatgagagctgctgacattcacagcgtggaccttggtggggttcatggcctcctggtgtcagtctgtggccccagaccaagcacggggatgtagataggcacacagttcacctggccgttctctgttgctgtctgtccctgtccacatccttccctgtgctcctgtcgtccatccctgtttgctggcccatgtttctagtccatccatcctgtctccaaggcaggagaagcagaagggggagggtggctgtgatgagtgagccctgggctgagggaaggaaaggggtgctgcccgctgggccgagtgcttggccctggactgcattgtgccctgggtccccactgtggcatctgcatcgaggacagtctcctgggggtggtactgggtggctgcctgttggcccaggtggagctcatccccatgtctcccacccttcactgtcccagtccctgccctccattccccctgtcctgtgtgtcacttcctccctacccatgtctgtctcttcctctgcctttatgtgtttgttcttagtccctttttctttttgctttagaacaatagttcttaatggtattttggagcctgggtctttttgagaatctgtcagaggccacagatcctctcttaagacaaatgctcatttgcttggagtttccgggcagttgtcaaggcctcatggcctccagctgcctgttcaggaacctggggtcaggagcccagcacaggacagtggtccatagggcctttccgggctgctgacaggatcattgtcttcatgggtggtgtgggggcctggccttgagtccaaggcttggtgtcctttggacaaggccctgtggggagtgcccactgctcaacacagtgatgcctggctggctgatggcacgggcagtgttgtgccctgcaggcgtgaggctgagctcctgatgtcctctgcctcctcctgcagatcccatcttgggttctgcttctgtgtggctttcctctcaggctggagctggctcagggaccagggctcccccggggccaaggcctgtttcctccccaccccagctggaacttgttctacttccctctccctcccgttacttgatagctgagccagagccggcccctccctgggcttggctcctgtgcgggcgggatcagtggcctccctggctcagcatcttcaccccaggttggctgtcgtcctcgtcagggggagaccagaagggctgagtggcccagatgggacactgctctgagcctcaatttgctgatccacggaatacgaaaaccaggttacatccccagtgagtctggcagtttggggaggggagagtaggagaagatctcttgtgttttggtgcctctggtgcccactttctatgtggttggggacagggccccagcgaggattggggaaggggcgtgtttggacttttttagccctaggtgaccttgattgtcctagggaagtaaggacaggccaggctggactgagaacataggggaggagccctcccctccccagtgagacagcaactccaggctttcccgcttttagatgggccccatctggactctctcctgtactccagagtaaggctgtggggtgctcaggtgggctgcagcagttgccgtggggacatggatcaccagtgtggctagagccagtagaaacgtgcttcttagtcgttctgagtggagctcctgtgtcatccttccttcccccaactccctggttggggacaggtgctccgttgacctgtaggtgggagagagttgactcccactggcagcaagggctaccagaggggaccccagggagagtccagcttgcttggtttgctccttgaagagcagcttggaggtgggacagtcacaggcttctgactggggtgtgtgtgtagtgggggtggggctcttggcaggcagattgtcaccaatagcctttaagtctttggtctcctggccctggtcccacctgtccctcccctaggtgggaggggtggagagcaagtttcctgaggccttcccctgtgagggcaggaagtagatactttccttggggccagaggatgctttcacccccaaggtgtgtatatgtgggggaagggtggggccctaaagagcaggttcctgtttctgtgtgagtcccatgtgcttggtgggaggcgctgtgtgagaatgtacagggcaggaggaaacatagcagggctggggtgcagaggaggcccagagcagtgcactccagtctgcaggtactgcactgggcactggggagaccaacctggccccaggggcttccctgtggctgccttccagggcagtactaggtaaacaggtgcctgtgctgatgccatgttgctaggagtggaacggacaatcagccggagtactcaaggtgacccttggtctctgaatcctgaataacaaagagggtcagaaggaagagtgtcccaggccagtgctgaggccttgtggtggcgatgagctcagcctgttgaggcatggagcagagtgatgggagaggcacatgaggttgggggcctttgaggctgtggttgggaatttgtattttctcaggatggagtgaagacctggagaggaggggctctggctgctgtgtggggatgaattgtgggaagagggtgcagcactggaccccttccctgccacccatccacgtgcatcatcagtgtaatctctgattggattcctaattggggaggtcttgcccatctctagtcagtaactcactgtttctaagcctcctggaccatggcccaattcttctcccagtgaggtggttgctcagagtgccgacccttccatagggagtgagcagtgcaaagaaggtgccccctcctgaaccttgaagtgtagccattagggttttccctggggggccttctcactaattgtactctggtgctgccagagagaaggttgtcagcttcccactgctaggtggcagtagatggtggcagccctctctttccagggcaaggtctggtggatgaggtgcacatggttaatgcagagcagcttaacatccaccacagagggtgagccctgggataatgtgttgggaggcgtcctggggagggtgaggattgaagcagcccagtctgctgtggcgtgcgtgcttggcaagcatcctgttgtggcagtggccactgatgtttgatcgtgaatgtttatcttgggactgtcttgctgggccgggcccataggtgtagctgagcattcgtggggaatggacgccagcagagttgtaccagggcagagaggtcagggcagagaggtcaagacagatggtccgggctggggagaagttgaagggtccttgtgccagtcctcccctttttgtgtgctacctcatcttgccactgcagtgactttgggcagagggtgggacagggaccttttaaaatttttaaatggcatttcagcctgtgctccagttctccatgtggcaggcactgtgctggctgtcttcccagacacttgttatcttgttcacttgttccacaacaacctgtgaaatagctgtgagctccattggatccatggatgaggaacctgagaccaggaagtcacctgcctgatgccacagctcatgtggcagcactgagacttgaaccagggaattgtgtctgcagaagtggctgggccatttcctttacctctcagccacctttctgccagctccctgatgacaaacatcccggggccctggccacagcattgtagggctgggtcaggggagtggcaactgtcaggcagaggaaagaaccctgtagacagagaaaccaagccctgcaatgagtcctgttagatctccaggagttggggctccagaacctcccaagttatgttctcagagagattaattgctaccgctgtaaacagcagtgtttattacccctgctgtacacatcaggcagttgaggcccattcaggtgttggaactggctagggttacccagcaaattatccttggagttggaattaggtctttctattcagactgtagcttttggctcctgttcggaggtctatgggacagataatttagtggggattctttgtagtccagggcagcagttcttaacattgctgcatggtagaattacctgggaagctttaccaatttcaggcccttccttaggccaggtacttcagaacctcagagctccccagggggctccactccacagccaagggtaagaattcctggtctagggctgtgaggccacctccttgcacacctgaaaatgtttaaattggtattattctactgaaatggctgaggtggggtttggggtatcttgaaacaaatcaaactctgttactaattgagccctagctgggtgccaggccccaggtatgtgtgttgggagggagtgggctcttgaggcccaggagctgaggtttctgatagacttggggatgggattttggctgaaaaagaaagtcttttggggcaggagcttggaacccttgacccaaggagtcatggggaagatggggcaaggaggggtgggaaaataggtaattcatggctgcttctctaagatgtgcctgcctagccccagtaaacctacctccctccatccctgccaggccatggtggcgtgttacccaggcaacgggctcgggtacgtaaggcacgttgacaatccccacggcgatgggcgctgcatcacctgtatctattacctgaatcagaactgggacgttaaggtaggggtgagggtgagggtgagggtggcgctggggctagggctggggcgggggtggcgtgcgtccactccattttccactctcagcccagattctggcattctcctgtttctcttctcaacacacagcgggcagtgcgatctgccggctcttcctgggaaatggcacctcctcctctctagcggactgtgtggtgggaactcccctctttccgggaatggtgctgtctgcccagccccacccggccttgtaatgaacactttcccccttttcctgtctttagtagcttcctgcccatctccatggtgatgcagtctctgggttgtcattcactttgagagcccgaggggtgggagggagtgatgcaggcagacgctgcgcctcctagtgggctcccggggcaccgtgggaggcagcggctcctggccgtaccagctagcctcatcctttggcctgcccccaggtgcatggcggcctgctgcagatcttccctgagggccggcccgtggtagccaacatcgagccactctttgaccggttgctcattttctggtctgaccggcggaacccccacgaggtgaagccagcctatgccaccaggtatgacctgtacttctggagacgcacccaggtgctccccctgtgacaatgtcctgtcagagcctcagagtgactagggagcgacgaagtattgagagggggcctaggtgggagcagaaccgggtggctcaaaaggatggccgcctagtgtgtgtggatatggtagctggaattgcagaaaactaatgtccaaccaccctggtctccaggtacgccatcactgtctggtattttgatgccaaggagcgggcagcagccaaagacaagtatcagctaggtacctgcttccctcccttcagtccttcctattctgtgggccctcttgggcctgatgccaccccatccccctcatcagcctcttgttaaatcccaccactcatttttcttcatctctgcccaccttccttagcccactctcctggtaccccaacaggagccccatttcttcctggtcctctccccatctccccaggtttcccttggcttctttgtccttctgatgactcactgtctcctgtcccctctcacccccagcatcaggacagaaaggtgtccaagtacctgtatcacagccgcctacgcccacctagtggccagtcccagagccgcatggcagacagcttaaatgacttcaggagagccctgggcctgtgctggctgctccttccctgccaccgctgctgcttctgactttgcctctgtcctgcctggtgtggagggctctgtctgttgctgaggaccaaggaggagaagagacctttgctgccccatcatgggggctggggttgtcacctggacagggggcagccgtggaggccaccgttaccaactgaagctgggggcctgggtcctaccctgtctggtcatgaccccattaggtatggagagctgggaggaggcattgtcacttcccaccaggatgcaggacttggggttgaggtgagtcatggcctcttgctggcaatggggtgggaggagtacccccaagtcctctcactcctccagcctggaatgtgaagtgactccccaacccctttggccatggcaggcaccttttggactgggctgccactgcttgggcagagtaaaaggtgccaggaggagcatgggtgtggaagtcctgtcagccaagaaataaaagtttacctcagagctgcacacatctga

SEQ ID NO: 61 - DNA, 26869 bp, Homo sapiens
tcccggagtctggccgcagtcgcggcagtggtggcttcccatccccaaaaggcgccctccgactccttgcgccgcactgctcgccgggccagtccggaaacgggtcgtggagctccgcaccactcccgctggttcccgaaggcagatcccttctcccgagagttgcgagaaactttcccttgtccccgacgctgcagcggctcgggtaccgtggcagccgcaggtttctgaaccccgggccacgctccccgcgcctcggcttcgcgctcgtgtagatcgttccctctctggttgcacgctggggatcccggacctcgattctgcgggcgagatgcccctgggacacatcatgaggctggacctggagaaaattgccctggagtacatcgtgccctgtctgcacgaggtgggcttctgctacctggacaacttcctgggcgaggtggtgggcgactgcgtcctggagcgcgtcaagcagctgcactgcaccggggccctgcgggacggccagctggcggggccgcgcgccggcgtctccaagcgacacctgcggggcgaccagatcacgtggatcgggggcaacgaggagggctgcgaggccatcagcttcctcctgtccctcatcgacaggctggtcctctactgcgggagccggctgggcaaatactacgtcaaggagaggtctaaggtaggacgcgctcggcgccctgccgcagctgctcccgcggggacgggaggcactcggagtccgttgtatgtcgacttcccagggccgtaagcgaactttgttttttaaccaagaagtcagcctggtttgtctctactcgctgcttccccccacccctcgccccagctcctctgagcgaaagtcaacgttaaggggctcaggtgaaccatgatgatgaccttctgttgactttgaaatattggctcttgtgggtgacaaaagccagacaagctgtggctgtggtccgattttaagacgaggttctcaaagatccaaaggagggaaagggtattggaaacactgtgtatcatctgagacacacgtgtcctcatgatcttaaatgcctactttaaagccacctaatactgcccttcattgtggtcagaagagatttctacaaaagcactcagaattctggaggcagttgtgattttgccatgtggcagttggtttgtggagttgggcaggtgtgaaagggtaaaactccacttctgaatgctgcttctgccccctgggacccagcacattgttagaccatcttcttgactgaaaattctctcctgatgctgagccctgcaccaccaccttccttttcctaactatgaattgatggcaaagtccactcaaaacaaccagttaagtgctcacgagagagtagtcaagcacctccagaaagaaaccgggtttttgttcacatagcaggaagtgactccctgggtggtaatttatcttggaaacacaggtagattggcagaaaaacgggaacatgtaggtaccgcgatgttggtgcatgtccattactttgggataggctttctcagtctttcctcaaatgatagttgagccagttttccagtggcaattctgagtgacttgcgcttgtcttatggtgtggtcaagggacgttcagaactacggaaaacttttactgaaacagcgaagcagagtataccggcatgagagggaagatgaacactcacctatgtaccactctttgacaataaatatagtatttctcaaatcagtctcaagactgatcctgtctcagaacagaccattgttctctcatttctctaatacgctgagaggaacactctgaataaaggctaagtggtgaggattggaaacgtgtgggagtgaaggggtggaggtggatgagtgcagtggggagtcacagtttgccgtacaacttccaagccaagaggccatgaatagaatatctgaaagcatcgttattaatgcacccaagtaaagtaaatcttagaagatactgctttctaaattttactttggggaaaaaaattccgcgtgagctgaactctgtaggagattgatgctaaagtgtttctttattcttcttccatcatgttggtggtggattagtcactcgtctttgactagtttgatttttgcattaaatgaccttgctgtcttctgtggtggaggtgtgtcggggaggggaagggtcagcctcagtgttgctgagatgctggtagtttctacctggaagagcagacggcttcttattgggtttttaaatgtttcttgtaaatttaggtgttaggagtttttcttcatcattctaggagcagaatttgctctgagggaggtcaggattaattggtatggaaagaggccactaacattgaaagttaaatatttttatttagctttgacttaatggatagggatagggtttcagactagaatttaactcaaatggaaggaaaaacactgtgtaagttagggtaagggaaagaaagatcctgtagatatgattcatcaattttaggttatcttttgggtggaatgaaaaactttccaggtgaccctgtcagaaggtgatcgtgaattgaaaataaaatttatcctgtcccacccccagatttccaggtttactttggctggtttgtcacaaagctccctgccctttagataaatcacctttcgattggaatattccctggccaattagaaccaaatgcaaaccaggcttgagcaaacaactagtgtagttaaattttttttaagtgtgctttgcttgtatacagaagtctccttagtgatgtcttgtggtcttgggtttcttgtttgaagttcattattaaagtcatggtagaaacactttccatttctacatgatttttattggtttcacattaatttatccttctttttcttcactcactttttatccctcagctgagctcctcattttgtgctgctttccagagcagtgatagagacccagtttaccggttcatccttcacccgtgttttcaagaaaaactaaagttttaaatttatttattattattatttttttgagatggagtcttgctctgtcgccaggctgtagcggctcactgcaatctctgcctcctgggttcaagtgattctcctgcctcagcctgctgcatagctgggaccacaggcacgccaccctgcccagctaatttttgtatttttagtagagacggggtttcaccatgttggccgggctggtctcgatctcttgacctcatgatccacccgcctcggcctcccaaagttctgggattacaggcttgagccactgtgcccggcccttaaatttatttttaagttttaattaaggaaattttcaaacatacataaacataagaggctaatataatgagctcccatcacccaatttcaacaattgccaatatgtacatttgttttagaccaattttttttagctactttaaatttcttgaggttatgcttattcatgcacttacccaaatttcatttctttttttgttctttgctagacttggaaagatcattgaataatattgccctttatctcaatgaaacaatagcaaagatattgggagtaaaacagaaagatacactggacctaaaattgaaattgtggaagaatatagaaagaaatattagatggttctgcttcctgccaagaaagttgttaatggtcagaatttgtctacctcatctttgctggagaaaaatccaagggtgttgaagaccccttgggaagtggttcctgtaatgtacagctgtatggccccccctaacttcaagcatgatcattgctttcaggctagcaaaggatttatccgctcgctactcccttttggagattttagaccatatccaagataaatattggtcataatttgctcctttttctttggctgcctagatcttgaaaatggctgttttccagagaatgtataatttttagaaccaaaagtccctctgcttcaaacagctcactgtagactcactagttagtgactctaataagaagaactaccttttattgagcagtttgtattgtctggcactgtgctatgcactttacaaatactatcttgcttaatcttcagaaacacagtcttaaacatattgagtgattaaatactgtgcccaaagtttcaaagtcagtggtaagaaacagtttaaatgggggctgggagctcaggctcagtgttaactaacttcgtggctttaggcaagttgcttggtttacaccaggtgcaaaatgaaaggaaataatgccgtaaagctgttggaggaagaagcattaaataagatgatgtttatgaaatgtttagcagaattccgagccttcatcagtgttttaagtctccagaggggaaatttgggatcctaacctagatttgtgtaactccagagactgtgttatttccttttattctctcctacttccgacctttcatttattcagcaaatgttatggagtgttcagcctgtgtgggatgctgtgcaggggtggtggtgccatgatgaacgaatttatactttcgtatactttgaattgtaggatggtctcattcacacttgactaattcttaggcttaagaaaaccctcaaacattgaagtgggtcagttgagtacatttgaagaaaaaaatagagtactgtgctgatgttttcctactgttttatttatttatttatttattgagacagagttttgctcctgttgcgcaggttggagttcaatggcgcaatcttggcccaccacaacctccgcctcctgggttcaagcgattctcctgcctcagcctcctgagtagctgggattacaggcgtgcgccaccatgcccggctaattttgtatttttagtagagacggggtttctccttgttggtcaggctgatctctaactcccgacctcaggtgattcgcctgccttggtgcctcccaaagtgctgggattacaggtgtgagccaccgcgcccggcttctactgttatttttaggaaaacatttattgatagggtttgttcgtaggattcctgaccagactagctctggaaggtggcattgtgaggactgcattgtgaacagaccaattggtcctcccctggaaacaataaggaggaatgatgaaacagcaaaacatttatgaattaaagaagatgtgttgcaaggtggtgtgtttattccttgctgttgagcaataacagttttggcccacccttctcatgtgaggtcaggaatatacattatttaatggagcttatcatggttgcaaactactttaagggaaaaatgaagcaatgtactatgaagtgatctcgcaggatccaagtgcaagaaatgcagtcagggttctcagaagcttagaggtatgaactaggaagcagaaagtccttaacatccaggacagctggtgtgttcttttctcaggagcctcatgacctccatctttgcttccctgcttttgctcttcatttcttatcctcttttcaatccagcttttgctgccttcccatgcacatggctcaagatggctgccccacaatggccacctcagcctttagttgcagatgagcagagacttcagtaacattcctggatccctgttttcatcgcctgggagaaagtctgattgtctcaccttggctcaagggatctatcagccgtagtctggcacagtgggaggcatgtggaaaccatgcatcacaaatatggttgccagggcccatgagagttatagctcttagagcacagagtttgagagctggataccataaatggtatctctgcaattagaatcttagaaatctacctgtgaataaggtattttggggaggagtgctgctgagtttgaagctctggaacactgtgaataaggtattttggggagaaggagtgctgagtttgaagctctggatcatctttctgtaaggatgtaagggattcctataaaagcttttgtattaaaaataacttagctcctgtaggaaggaaattactccacagtaataatttacagaatacagtcccagtgacagtgaaacaagtctctccaatgggcaagttttcatggggttttttgtctattttgtgaatgacatttggaaacaaaaaaggcaggagggtgtgtgtgtttaatttgtaatttcttttgctcaattttgggccactggccacttcactataaccttatctgcttcagagaagtggataataaagggatatcgatttaattcattcacagatcactcagtgctgcacactgtgggagacctgtccgtggatggggaagggaagtgcccagtgattacaaaaccacctgaagaactaagctgagagttgagtgtagtgtgcagtggttgtcaccaattctttctctttttctggttaaaaagtgcacgtttacgctcattagtcattgtttctctttgggttttctccaatttctctgttaatttaaaatgaagcaaccagaacaagtgatcaaaactatacaggatgttaataatatgggtttttagggctagagagatattagaagtcacatctatccaatgtctcagtcattcagcagttgttttcatatttggagagatgatatcttgagcagatccttgggaagggatggataaaaggtactttaatagagaaagggtggctgggtgcagtggctcacacctgtaatcccagcactttgggaggccgaggcgggcagatcacaaggtcaggagtttgagaccagcctggccaacatggtgaaaccccatctctactaaaaatacaaagtctagccgggcatggtggtttgcgcctgtagtcccaggtactcaggaggctgaggcaggagaattgcttgaacctgggaggtggaggttgcagtgagccgagattgcaccattgcactccagcctgggcaacagaccaagactccatctcaagaaaaataataataataattaaaaagaaaatagagaaggggctacgctggctgggtcagacagactgggaccagggtcagtaggttaattcagtggcatcaccattttatttgggaattttaaatataattctgactgaaaattgataaacacccttaagtggagttatgcaagcctgtctctgcataaggttttggagtatcatgaatgatttccctttctaacctttctgcttcagctcaagcaaaattggtaaaatttttcctgattcctgaatctcctggaaaaacttgtaatttcataagtaacaaacagccctccattttatgaccctatcccaagaacacaccatgtatgaaagatttctctgaggaagcttaaaggtcagggtggcgttctacccaacctctaatgagcagagtttaagcactgccagcatcttgtgtacttccggataaagcttggaaggctgctcacctgtgggccatgtttggtttggcaaggcctctgcttttgacccaactttgcagccctaggtaaattaaattacattttgatctgtgcccactgaagaccaagaagtagcttgcaggttaacattatggagaaggttattaactttttgttaattattacggcaacagactccacaattccttggtagcagcactttgtagttgttaagtgatattgctctaagaaacgggtgtcgcttttctctagtgtttgtcaaatgcacatgttctgacagtaatgatagttcagatctattttgctgggcatctgccaggggtgcccagtgggtagctgaatccagaggcactggaattgtaaatacaacagacaaatcatttgatggtgccagactaaggagttcagctttggcagattgccaggagccgttgattgggctcagattcagtgctatgtgtctgtttgccaagcaagattagttgtcttggttaattatacatagaatttgtaccccctttctctcgattatttccatcttaaaccggtatgacatttactttaattttgcatcttgttttgatattgatttgtgggtgagtttctgtccctgtttttggtgagtctgtagtgactacgttttcctgccccggtcctaacacaatcccagccttacagaccctgggtttgctggtgtataatgcaggctttcacatcttgtattggattcatttggtaccttgttacttagtgttctccgtgttcagtacagtgtcaatacctccttattaaatcaagctaatttttgattctttagaaggtacaatgattctcaagttctggagtacatgtgcctatcttatattaaacattagtttttctttacaaaatgaggccaaaatacttattgttgccatacaaaaataattccagaatacaaagaatcaaataatatgatagtaacctcaattctttgtcagtgggaagaaaacaaaatgaaaaactcaattccaggtgtcaataacatctattttttattctaatgtgagaccctgaagttccatctttttgaagttgtcaggataatttcatttgagcattgcttggaagctgtaaggatatactgtttgggacccttttatttatttttatagagatggggttctgccatgttgcccaggcctcccaaagtactgaaactacaggtgtgagccaccaggccaggccaacaaaaccccttttaaacacaaaatattgaagattcaggcaagaacatgcagtattgctagagaagggcctattgtgctttctttgtttagttttactttttaggttcactatagaacctcaagttgtcttttttttttttttaactaaactttctttcctttcttagtagaaaaatccttgaggggccctttcttagtagaaaaatccttgaggggggaagttttttaaagtaacttactgtaaccataaatcacttgccgttggttcttgttcttcctgtaatccattttatgtacttttgctagagtgtagtagtcccaattccaattctaatcatgtagtctctgtgcttaaaacaaaataatccaaaaatccaaccatgctccttcttcattatctactatacaacactgtaaagactgtaaacttagccagctttgacagccctctacatctgaccacatctgacctttctacacttaatttcccaccactgccttcctttcctcccagtccctgaaatgctagaaactaatttgccaggcataatgagcttccccattgtcttccactcatcaaaaatccatctctaccgccttctagtgcctgttccctgaagtcttcccttctgctccccagaactctgtcgtggctcaatccaggctgcccagtacatggatttattgggctgtttatgctgtccaccgtgtgcttagaaattccttgaatgcagagactgttaagctttgtatatacttttagtgcctagaacagtcccttatacttcataggtgcttgttggcttaatttcatcttcaaaaggaactttgattttgatggatatttgaatgttaaaaaaaaagctagaattttttttgggggggatagaggggaatgacgggggaagatgggtggctgcagcttagtctctaattcgatgcctaagtatttaaatattttattagagtgacatgttatgtgagaccatctcaatggaggaccttagctttgtaagttttttttttttctcagtttcgaaatcctaggtttcaccctagaaatacccgagtcacacctggatcctggcagctcatacctacaggtctggctcagagacgccagggccacgaggcttagggccccaggttctggtcctagctcagcccctggcaagtttcatggtcctccatttccacttctttatggatgagttagatacttgttttcatttttgaacttaaatttggtcagcacctaccacttgacactaggatggacacttcagattttatttcatcttcctatgatcttgggcaagtcagttctctgagcccactttcatcatctataacataggcacaataatactgtatgtctacttctaggattataaggaattaacattgagatgacatttccatttgagaaggaaaatagttgctttcagtgccttttatttgattcctggagagagcagactcgcaccgacattcaaccccagcgctgatatgacagtaatcctcagaggcagagcccagcacaaaacagcaatgctagaaagttacaattggaaagtttcctgccagcttcgggaatgacactgcaaagctgatgccagaaactgccagagtaattctcctcattactgctctacccacccactttcagctccccaaattaactagtgcagttgactaattcctctttacctttatcatttagggtgaggcattgcacaaaaactctcgactttgccatataagggctgtggttctctgtggtccctggataagaggcatcaccattatctggaaacatgcagtaaatgcagattcttcatcttctccccagacctcctgagttagaaattcacaagttctccaggtgatctcatacatgctaaagtttgagaaccattgagtaaagttaatgcattaagaagagattagatagggatggtggcgtatcttcctacagtttccctgttaacaagaaagtcagaggtcagttgatcagacattagattatttattgctaaaactaaaaaaaaaaacaaaaaacgatttttagttcacatttatagcctattatttgtaccagcatatttaattttccagaactagaattgaagcaaattttggaaccagttccctcctgttatggtgaatggaggtgaatgtctggcctttggcaagacaactgcatttgaggcctatgtggaccctgcaggggctacagagattttatggtgggcttgaggttgacctgcactgggaataaccaaagcaaagacaagatgacttggacaagtagggtcaattttcttggcctcttgcctttgttaaaattccccctttggatctttgagtttacagactgaataccaagcacactcttttaaaaaaattcttgcaattgtttgtattttgtgatttttctatcactctggaagggtgataggcaaggatgaggtaggtggagtcaaatatttcaagtagaaccaaagatcttagttccctcaaaaatgaggtgggggtgaatttgctaatgtcagacattagataaactgagttggtaaagcacgtcttaagacctcacactcttcagccagaccaactgggttcaaaaaggcaagttacctaagctctctgtgcctccatttcctcatcggtaaaatggagataatgttcctacttcatgcggttgttagggagtgtgaaggaggtccgatttgtgaagcacacagaacagtgttgggcacatagtaaatgctttacaaatgtttgtttagtaaataaatatagccactgaatttcatgagttctaatctacgctaacttgctgtgtgtcatttctttcattcagcagatctgtttttccaagtgctgaaatgcatatgtaggtttctcctgttttaagattgtttcggccgggcgcggtggctcacgcctgcaatcccagcactttgggcggccgaggcgggtggatcacgaggtcaggagatagagaccatcctggctaacaaagtgaaacccagtctctactaaaaacacaaaaaattagccgggcgtggtggcgggcgcctgtagtcccagctactcgggaggctgaggcaggagaatggcctgaacccgggaggcagagcttgcagtgagccgagatcgcgccagtgcactccagcctgggtgacagagcgagactccgtctcaaaaaagaaaaaaaaaaaaagatgattgtttcaaggcatttttcatgacattttgattggtaacttcgttttttcatatattatccattattaaagtcttgtcttaccaattattttgagttatggattctttaagtactttaggattaagttcagatgaaaatttcaaatattccattctctgatgagcctgcagtcacaagtattccttgtctctgttatgctcaaagcctttagagagccataggtgatgttttattattctgataaggctgttttctcatatcaaaggaagtcgaatattatgtttctctatagaaatacctgtgataacttctaggtccatagggtaacttctagggttaatgacttctaccaaggacttggagcggtgtgactcagggcacacactgctgctcaccttcccagtaaccaggaaattaaacaagatatgtgcaaaatgccaccgggctacatgaattctcaggaaacagcagctgttaatatttggggaaaggcatcagaaaggaaatggttaaatgcgtcttgatgtccttatccctgggctggactgacctttgctgattttataattgtgaggaagcccggttgaaaacatttctctggtgactggggtagagatgggggagggggatggttcccagtgtccgttcccagctcaggctgcctggcggtgtgctcgggtgtgggctggctgccaccctcacgcagcgcacgtagccctgtcactcagccatcaccctgctggcttagagccagtcctccacgggaagggcggcctgcccaaacccaaacaccctgtattaatatggcgatgttgccgggcctgtttactgtgcctaattgcatgggctctggctgaatcccctccaaggagaagaattaaccacaatgcagaaaggaatgacaatagtctcttaaattcctggcctctgagcctttcagtggcttcttgggggagggcgattcactcagaaggtcgtgcatgaaatgcgggatctcctggaatagaatcttgatcccgcacagttcaactttagaggcctttgaaccccctagaatttcgtgcagacttctgtgtgtgcgtgcatatttcttacatccttttaatgtaagaatctcaaagggctattgtgcctggtagaactatcatcactgacccaggagaactagatggatgcttccacgctctgggtagttaatgatcctgaagctaggaccaagttcatctgaggacaggttttaaagtgagaatggtaaattctctgctattcaggcacggtgctctcacctggccaggagggtgtgggcagacccacttcactagagcaaccgagagtcggttattacttcttattttttattttcagaagttctgaagtttctacaatattagaaaattcaggtgtaggtatgtgatgaccgttgttctaccttgggagagaggtcatgtgtagcagtgttctgggtaagtaggttctgcgagaggaattatttttagtgtggatttaggacaaatgaggagggcagaagtagtctgcattgtggaagtagagtagtaaaaaacattttcatgaataatttggggtttattgaaaggattacctacctgacaggtatttgtctggtattctgaatcttccaaatggtctggtgagatgctgaagctttggaaaggtgaacacggtggctggacacagcttgtgttatggcccaccaaaagtgtattttctctttccccctcattttattacatcagtctgtaactagaggcactagaagtcaggaaatagaatagctaggcttgctcttaaccaacaacaaagatgaccagcaagatgccaaggtaactgatgacagtttacacaaaatttcttacttttctaagagctcacgtttgcttacaactattttcttcatgcccgtctaggtgaagtttgaatgtctaaaaattctaaagcacttttaatacttacaagttagcactgcttcatcatcacattgagaccttttttgttcaattctgtataaaggataagaccagctggcagcaaatgtgaacttttgcagtgacattttcttaaaacttggagaaagctttgcatagttgccatcgtcttgtaaagaggccctgtgaacattgttctgtaggaatttaatttacttgacaacagtagatcccacaaaatgtccttgaagatcacatatccctgaacaagggagatgatagaaggttgaagtagtaattccagtttgcttttcatgtcctccggatttaagttgcaaatgattttttgagttcttttctctcactccttgtcagagccaagtggaaaataatggaattggacattttggcttaatttgtctttagatttttttttttttaaataaaacttgtaaagggcatgtctctttcaggttttgtttttttttttctccagcctttcctccagtatgcctgcatatagcagtttgaatacctaaacgtttttttggtttttctttctttttaaataggagaatttcagatctagagctgctgctagcacatatagtgcctttgttccagctactaatcccctttcccctccctcagatgaattaccaaatggggcccctacatcagcagggtgccttgatgaaggcaggacctaaagtatgtgatcatggggatgccctgctcactggccacagtcaaggcgtgtgttaaaatatgtgctgaacataaaccacctagaaaaatagccctggaagtgtagccttcagctcctctacccacagctgactaaaaacattggcaagtttgtcacctaggctgttgtcacccgaatataaatgagacccatttctggccagaaaacttcagctatcacagtctacattgtgatgagttgcttggctgtttttccaagcaaaagaaggtgcatggtctcatgtatttcctcccaactcttatttatttatttatattttttgagacagcatctcgctctgtcgcccaggctggagtgcagtggtgcgatctcggctcactgcaacctccacttcccaggttcaagcaattctcctcctcagcctcctgagtagctgggattacaggcgtgcgccaccatgcccaactaatttttgtatttttagtagagacagggtttcaccatgttggttaggctggtcttgaactcctgacattgtgatccacccacctcggcctcccaaagtgctgggattacaggcgtgagccaccgcgcccagcccccaactctttacacatctagttgtctgtgttgttgtgcctgtgtcgttgtgccttatggtggagaagggaaggatcctgggcctctgttgctctgtactgggtggacatgggggaaggacttgatggagcgaggtgtcaggatgcaattggaatgtggatggcattcaggatgaggcattgtctttggataggatgtgtttgagtctggtggagagagatggggaaggtgcccactcagcagctgtctcaaagtagctttacttcttggaagtcctcacacagtgatctcaaaatatagcctgatatatgtgtgtgtatatatatatatgtgtgtgtgtgtgtgtgtgtgtgtgtgtgtgtgtatttatttatagccctgattaaaaaattgggatcaacaatattcaggagagtttacataaagatctgattgcctgctactctcataaaatctgaagatttgctctcattgaaaataacagcaagtcccctcagtgtaggtggcataacacacaccagagttctgactcatgtataccggattggcttcaatcatttgttactcgcaaacatcgaaagctattttagtttgccagtcctgggttcaaaactacaaaacacttaagtagaattgggtctctgaagaagagacgttctacagcttcagttgaggggaagacaaacataacacatcatctttaaaaatagctaacatttattaagcacttagtgtgtgccaggccgtgcattaagcattttacatggattatctccctgagtctgcataaacccattttacagatgaagaaaccaaggtgtaaatgagctaaatgcagattatcccgtacttaggttgcattttattcaaagtacgctttgctcaagaccatgcttaattcaaaatgaatccttacaaaggttggctggtatttctacttagcagctggaggggatctagcatttgtcggtagatcagaatactagtttaaagctccttcaaccagatagttttgaaatcacgcttttctcaacaaatcttaaacaatggattttcatttattggaaattttgcaaataaaatgagatctaattagtactttaatttggtgagttaaattttgtataaaatgccactttattataacttgttcaagatcgagtcatactagtgaatctgtctcaaatcatgagcaatgtaaaatacatttctatgaaaatacatgttgcaactgttagcagagaagtggtaacggcagggtgggtgtatccccttctcacctgtgggtctgaaaaatgatcatcattgcctagtggatggtggaggtcactgatgccaagtttttgaaatggtttttacatgcagtcaagctgcggttgatggcattcaagagcattctgtttaggcattggaatggaaatcctggacttttatttttcaactttacctttggacttgatgagataggttttttttttttttttatgaagtcagctcactggtaactcttaacagaaccactgtttccttttccacctgtggcatttggggaccacttttttatactgggttttgactgttacggttctatatatctgtgtatatcttcaaaggatacatatacgtttgttgtctggacatggctgcatacgtgtctagagcacatattctggtctagagccagcctgggccggcctgattcacctctccactcatttcctattgctacagagctaaggagaggcctctgggaatggggatggtgggaggtggggtgggtacactatataatgtcagtggacagagcggtaaatgtgtaaggggacatgtggatttatcagtatatccaagaatagaactataggactatactgtatgtgctgctgtagatgacactactgtgttaaacttgcgtaaacttcaaatattaatctagtcaggaagttttagaaaataaaaagcctgtactaaagtaggcatcctcttgatatgtgtcagtttattgcttggcatgtttgttatatgatcattaaattactctggcccgttcttttaacaataaagcattgaagacttctcttctgttaaacactaaatcccttccccggcttgatgaggtttagatagcaactcagttggactgatctgtttccggagtttgttactgccccgtgcacaaattggcacagaagtgaatggctagttattgaagtcaggcttgcttctcggtgcatccttagcctcatggttttagaccctgtcaaagacgagcaaatagttgggaatgtgcccaagcaaagacccatctcctatggcactcatccagaaaacacactgataaaattggccaaatgtagcctcaactggcccactgatgctcgaaatgatttccttccattgtttccaacttgatgcatgtggtttctggaaccaggagagagggtgaatgttcactctggccagaaaaattatctctttgcctccctcttaagcagtcggatactttgctgacatgtaggggttttgtcctaatagtaagtcctctggaattggctttgtctctgtgtgttttatagatgcggcatttggtagaggatttacttttgtgagtttgtatccatcttttttttttttttcaatattttaatctgagctgagttctgaggcagagaaacactccttaatgacctgaagaactatgttgctttttcaagggttgatgcttagatcaagtcttagatcttcttgggcctttgacagctgcgtaacccaatcccctctttataggaaagagacagcctgggatcacagttagttgcagagtgaactatggcaggcatccagaccactgaccttttccttagagaagagctgtttaagcatataagattatagcattgatgtcatactttttcttttcagacacactcagtggggggagcctgagataatagggaatccagcctgtaattgtttgtggcttaagcgactttcattattggctctgtggtggctcttataatcctaatagctgcttccaggggtgggtaattctttagtcattataggtgactttatttgtctcttcttctcttgctaggcccatcaattctgtttgctaccaatcacccttcctcaagccatgctttgcttagtggtaccatcatttgttaaatcttcattgctgacgtcgcctcacagtttcaccttctgaaagatgttcaagctaacagcctaacttgagctctaaggatgacatcacattgacattttgatgttcaaaggcaggatatggggattgtttgctgcatgaggatatgaagtttgagagagatggtgatttaagctttaaaattgttgtaaagtccagttactattcagccttattattgatctggcatgcaaggtgtgttttgcctagttccgtgttttcatgctactattgagagtgactcggcagccacgttgaagctgattcattgaaccactagcccattagcttggggctctactcaaacggtcattttaccaatgaagcaacgctgccatttatcaggaaatatatggcctggatctttacatgtatgtttgaagataggtcttttaaaatgacagaaatagctattgatctaggtaaaatgtgaacttactctttagagaaagagccattcgctagttcattgatttatttatcacattttagatggacaccttctgtatgtcaggcactgtcctaggtgctaagaatacatcagtgagtagaacaggaaaaaaaatccctgtcctcatcttgtgttgctggttctaatattttccttgcacctactgcatccctataaaaaatatttttcaaacatggcggtatcctgtgaagaaaagaactggctttctatactttgctttcttccccctccccactctgtgttataatttttcccttggaacaattagaggtctgtttactctaatggtaattttcagtaggatttttggtacggttttctactttattcttccacctggttgatacaggtagcacttagacaaagagaacttcagattatcacctgattacataattatcaggaagaagacacatattaagatacatgcatggcttttttcctgaaaggaatctccctgtgttgtctgtgttaacaagttagggtgcggcttcctattgatcttcctctattctttctatcctgagcattttattgagtaagcctgaccttttcctcctttggtgattagttctgtcactttgtgtatgcaaatacctttagccattgttctgaaacagtgtgagtgattcagcagcacttgctaaacagtcataatccctaaactccacacctagtgactctgattttgtagcatgggaaactagaaactgcttttccaaaaaggagtattgaagaaaggcagggcatacaaacaggttatgcaaacagggcatgcagataggttactttaagaaagactgtgtaaaatgttctagaactgtgggaatattgttgaactactttccactgggcagagccatagtatgacctggccattgtgcacagaagagtccaaatttatgtaccatacatgaaattaagaagccagcaactacctgtaaatgtcacgtaacacccaaggagactgtgttacttatctgctcaccagtgggaggagaagattgtctgtctcagctttgttaaccagctttcttgggatttctccataggcaatggtggcttgctatccgggaaatggaacaggttatgttcgccacgtggacaaccccaacggtgatggtcgctgcatcacctgcatctactatctgaacaagaattgggatgccaaggtacttttgaataatgggagtagagtgtggggttagaaactacaggaaaatgattcagataacttagaggagagtttatattgagttcatagttgccgtatctcccactgatgaaacatttctatttccatttcataacctcctgcgacaatggaattagtcctaaagttgttaagaagaaaacaatgaagttaatttggagtggggtaggtagggtgattattaaccctacctctgggaagggtggttgatgaagggaaggtaatttgatattaggattaaggattaatttttttcagtttaattcagagttgttctgactcaatgcagaataggatatacacttttccctcccagcagcagcattgagaaagttccacaaaaatagaactgtaggctataaaaccatccccaagagagatttcccacacagtcctctccctcggggtggtatgtctcattgatggctgcttgccatggcttactatggtttgtgaatgccaaaggctttgtggcttatttttgtattatagaacttatagatagatggagatatgaagcctggttccatgcttacagacattcatctggactctgtatgctttccgaaagttaagaatgatttaggagtctgggaagtcagataacttttcaagcttatttggcttttgaaccttctgcatctcaatttcctgttcattaggcaaatactggctgtcataaagcaataatatttatccagagtcagaaaaacgaaacttgggaaaccattgaatcagtgaaaaggcctatctcttctccctgtttggtaacatgactggaatacatccattaagtctcctttaaaatcttgagaggtgctgatagagacaagagaataaagttatcagactggtaataataaattgcaaggtctggaatcatttaacaaatatttgagttcctgctagtgtcaggcgttgtattatgaagaaacattgatgtgtgaggcctgaactttactctgaatatggttattctagtaggatgaaataggttgacatgtaaaaaaaataattcaaggaagagagtggtgtatgtcataaaaggtgcagattaggtggtctgagagttcagtaaaaagagcatgtaacttccaactaatgaggtcagataggagctaagggagttcagaagagctgtaaattctaattgaaggggaagttacatgtgatgattttcttagaaagttgttaatggttagatggaaccatgtgagatcactgggcatttttttttaagtcaaaaacactcaaatattggcaaatcggtatgattcaatctaatagtactctattttacgtccatgggctttatgactgtggggggtgggagtgctttttttggtttaaggtgaataaggagatatctctagctaagtttgatataaaatttggtacgaagtggctgggcgtggtggctcatgcctataatcccagcacttcaggaggccctagtgggcggatcacctgaggtcgggagttcgagaccagcctgaccaacatggggaaaccccgtctctactaaaaatacaaaattaactgggcatggtggtgcatgcctctaatcccagctactcgggaggctgaggcaagagaatcacttgaaccagggaggtggaagtggcagtgaaacgagatcgtgccattgcactccagcctgggcaacaagagtgaaactccatctcaaattggtacaaactatgaggttgaagtaaaaatctggggtaccatgcatttggagtggtggttagcagatggcatgtttctaaatggagctgaaatatggttgttgataaactacatgagaggtaagaaataatcccccttctttgtgtctttcagctacatggtgggatcctgcggatatttccagaggggaaatcattcatagcagatgtggagcccatttttgacagactcctgttcttctggtcagatcgtaggaacccacacgaagtgcagccctcttacgcaaccaggtaatagccggagccatgattcctcttccggagcttggtgtacaaaccctagttccagagaactctttaaacgtgtgtcctgtgcatgtgggggattgaccacaccccatagctgatagcaaacttgtttggagtctacaaaaattaaaggggaaactttgcgttctttagcatatcaaacctaacctcagtttgaaagtactattaacaagttgttttctattagatgagcatattggattccaatttctcaaaagtatttttctcttctctcctttcctcccttctcttatctctctttccctttttttaaaaaacctaatgttgaactatgcctagagaatgttggctgtcacatatcaggaattctgtctggttactttggatgagtttacaagctgctaattgcaagcagagaaagagccttgagaagagaaagagtaatttgttttgactttctctttttgtcttttccttggtttgaaattggcttgggcttgctgtatccatggtccaacagttggatgttttattaatcttttctttatcatgtgcacatgaagattctcagagtaactgaacaccttagtattgtttaggaccaatctagacaatcttgacaaaaaatcttcattctcaattctgcctctcatttacctttgtctgtgtctaaagcaataagccgggcagcattggagggctatggagtgcagcttatactgagactagcattcaggggcaggaggagagaattttggtaggatgatgattaaaccctaacaagcctaattaaattaagatcacatgtgccctcctccggaagtcacacagcttagccccaaacccagttatatattaactgccaaatcggaatgtcttctagatgagcagggaacgaattctaccactgaagtcagcttttgtgttttatggggtatgtaactaaaccctgttgtttgtggcagaagtctttggttattccccaatctcatgatgactggccttacagggaaaacattagcaaatgttgatgagaagtcccttgaaaaaaactcaagtgctatagaaattgttagctacggaagtagctaacaatcattacaaaatgaaactttaaaaaaaaaccaagcatgaaatggctcccattacagtctatccaatgaatgggataaagcaaattagtggggatgcagtagaaagctctggggcattattattattcaattgcaattttgcctcaatgtccaaaactaaagaaagcaagccaagagttttaaacatactgtgatttacataagtcgtttttcaaagcttcactcaaatgtcatctcttctctatgttctcgccaccaacttgggtctcccagtctttagcagaatgactcccttctagtcctttctgtagaggctatgtttacctgttgcattattgcaaaatcacctgtctcccctacttggagcctgagatcgcagaggaagatctgatcacagggtcatttgaattcctaatgcccaagataatttctggcacatacctggaattccttatgcattttattacattgaaatagaattaaaaccagagaagttaattttaaattaaaatcagcgtagacaggccgggcatggtggctcacacctgcaatcccagcactttgggaggccgaggtgggcaggtcaagagatcgagaccatcctggccaacatggtgaaaccccatctctactaaaaatttaaaaattagctgggtgtggtagcgtgcacctgtagtcccagctacttgggaagctgaggcaggagaatcgcttgaacctgggaagtggaggttgcagtgagccgagatcacgcctctgcctggcaacagagcaagactccatctcaaaaaataaataaataaataaataaataaataaataaataaatcagggtagacttctaataatagagaaaactttaaaacttttaatgtgagatttataggacatttgtgtttctagtagtaccattaaatctctttccttatatctgcttatctttcacagatatgctatgactgtctggtactttgatgctgaagaaagggcagaagccaaaaagaaattcaggaatttaactagtatgtgtttgataattttctgtgacttttgatcaagttaatccttgacttttattcaattttatgtagttttaaacatgttctgttcaatctgttacggcttagctttatatataatgacatcttgatgggttttatcctgaaaccttggccttagggctcttagaaaaatcagaaacaatgcaaggggcttcccctgagaatgcccactgaatgtatgatggtttatgatagatgggaaatagttaactttttcctattaatgttaaccagtcaaatgtaacattaaattttgcccatgatttttggcatattgcaaaggaaatataatggaacccagttatgatggcaaaatttattatattgggtgagactgtgactctcagtataacagcagggctcatgtaatataaactgaatataacagcactactcctatcccttccaaccagtattagaaggcagcatttcccaaaatacgttgcattaaaacacaaatcctgccaatttggtaaattcctggtcccaaaaatgtgggaaatgttgcatgctgtatgcctgtcttaaaaagagtcacattgctcactagcatattaaattaaggcgctaagagatcctgcagtaaggaaacatatataatattgcctagcccataacccatttggactgtatacctctcaaataccaaagtggtctccaaattgcacccaggaaatctcagtttgttttctcttccagatggcctacactgcttaactctgatatgtgagtgaggctacacttcatacaacttatgctcagcattagcccaagaggtgccaatgctggatgtaaacccaaagttcctccacagtctgtgaggcatatgggaaagatcccattgcaaagtcaagagagaatcctttggcagagctctattaggaggcttatataagatgggaagtgtttactggaggctttttggtgacatttgtgacataaaactcatcagagctgactccataccctctttattctcctttctgtccccaacccagggaaaactgaatctgccctcactgaagactgaccgtgctctgaaatctgctggccttgttcattttagtaacggttcctgaattctcttaaattctttgagatccaaagatggcctcttcagtgacaacaatctccctgctacttcttgcatccttcacatccctgtcttgtgtgtggtacttcatgttttcttgccaagactgtgttgatcttcagatactctctttgccagatgaagttacttgctaactccagaaattcctgcagacatcctactcggccagcggtttacctgatagattcggtaatactatcaagagaagagcctaggagcacagcgagggaatgaaccttacttgcactttatgtatacttcctgatttgaaaggaggaggtttgaaaagaaaaaaatggaggtggtagatgccacagagaggcatcacggaagccttaacagcaggaaacagagaaatttgtgtcatctgaacaatttccagatgttcttaatccagggctgttggggtttctggagaattatcacaacctaatgacattaatacctctagaaagggctgctgtcatagtgaacaatttataagtgtcccatggggcagacactccttttttcccagtcctgcaacctggattttctgcctcagccccattttgctgaaaataatgactttctgaataaagatggcaacacaattttttctccattttcagttcttacctgggaacctaattccccagaagctaaaaaactagacattagttgttttggttgctttgttggaatggaatttaaatttaaatgaaaggaaaaatatatccctggtagttttgtgttaaccactgataactgtggaaagagctaggtctactgatatacaataaacatgtgtgcatcttgaacaatttgagaggggaggtggagttggaaatgtgggtgttcctgttttttttttttttttttttttagttttcctttttaatgagctcaccctttaacacaaaaaaagcaaggtgatgtattttaaaaaaggaagtggaaataaaaaaatctcaaagctatttgagttctcgtctgtccctagcagtctttcttcagctcacttggctctctagatccactgtggttggcagtatgaccagaatcatggaatttgctagaactgtggaagcttctactcctgcagtaagcacagatcgcactgcctcaataacttggtattgagcacgtattttgcaaaagctacttttcctagttttcagtattactttcatgttttaaaaatccctttaatttcttgcttgaaaatcccatgaacattaaagagccagaaatattttcctttgttatgtacggatatatatatatatagtcttccaagatagaagtttactttttcctcttctggttttggaaaatttccagataagacatgtcaccattaattctcaacgactgctctattttgttgtacggtaatagttatcaccttctaaattactatgtaatttattcacttattatgtttattgtcttgtatcctttctctggagtgtaagcacaatgaagacaggaattttgtatatttttaaccaatgcaacatactctcagcacctaaaatagtgccgggaacatagtaagggctcagtaaatacttgttgaataaactcagtctcctacattagcattctaa

SEQ ID NO: 62 - DNA, 26688 bp, Homo sapiens
tggtggcggcggttggggctcggcgctcgctcgctcgctgggcgggcgggcggtgcgatgtccggagaggatggcccggcggctggcccgggggcggcggcggcggctgcccgggagcggcgacgggagcagctgcggcagtggggggcgcgggcgggcgccgagcctggccccggagagcgccgcgcccgcaccgtccgcttcgagcgcgccgccgagttcctggcggcctgtgcgggcggcgacctggacgaggcgcgtctgatgctgcgcgccgccgaccctggccccggcgccgagctcgaccccgccgcgccgccgcccgcccgcgccgtgctggactccaccaacgccgacggtatcagcgccctgcaccaggtcagcgccccccgcccggcgtctcccggggccaggtccaccctctgctgcgccacctggggcatcctccttccccgttgccagtctcgatccgccccgtcgttcctggccctgggctttgccaccctatgctgacaccccgtcccagtcccccttaccattccccttcgaccaccccacttccgaattggagccgcttcaactggccctgggcttagccactctgtgctgaccactctgccccaggcctccttaccattccccttcgacctactctcttccgcattggagtcgctttaactggccctggctttggcagcctgtgctgacccatgcagtcctccttaccatccctccctcgacttcccctcttccgatgttgagcccctccagccggtcctggactttgtctccttccctgccctgccctctcctgaacctgagccagctcccatagctcagtctggtctatctgcctggccctggccattgtcactttgcgctgccctcctctcgcccccgagtgcccttgctgtgccgccggaactctgccctctaacgctgccgtctctctcctgagtccggaccactttgagctctactggcttctgcgccgcctctggcccactgtttccccttcccaggcaggtcctgctttctctgacctgcattctctcccctgggcctgtgccgctttctgtctgcagcttgtggcctgggtcacctctacggctggcccagatccttccctgccgcctccttcaggttccgtcttcctccactccctcttccccttgctctctgctgtgttgctgcccaaggatgctctttccggagcacttccttctcggcgctgcaccacgtgatgtcctctgagcggatcctccccgtgtctgggtcctctccgggcatctctcctccctcacccaaccccatgccgtcttcactcgctgggttcccttttccttctccttctggggcctgtgccatctctcgtttcttaggatggccttctccgacggatgtctcccttgcgtcccgcctccccttcttgtaggcctgcatcatcaccgtttttctggacaaccccaaagtaccccgtctccctggctttagccacctctccatcctcttgctttctttgcctggacaccccgttctcctgtggattcgggtcacctctcactcctttcatttgggcagctcccctaccccccttacctctctagtctgtgctagctcttccagccccctgtcatggcatcttccaggggtccgagagctcagctagtcttcttcctccaacccgggcccctatgtccacttcaggacagcatgtttgctgcctccagggatcctgtgtccccgagctgggaccaccttatattcccagggccggttaatgtggctctggttctgggtacttttatctgtcccctccaccccacagtggggccactagggacaggattggtgacagaaaagccccatccttaggcctcctccttcctagtctcctgatattgggtctaacccccacctcctgttaggcagattccttatctggtgacacacccccatttcctggagccatctctctccttgccagaacctctaaggtttgcttacgatggagccagagaggatcctgggagggagagcttggcagggggtgggagggaagggggggatgcgtgacctgcccggttctcagtggccaccctgcgctaccctctcccagaacctgagctgctctgacgcggccgtctggtgcgtttcactgatcctggtgctgcagcttccttacacttcccaagaggagaagcagtttggaaaaacaaaatcagaataagttggtcctgagttctaactttggctcttcacctttctagtccccaatttatattgttcctccgtgcgtcagttttacctgtgagataaggccagtagccagccccgtcctggcagggctgtggtgaggaggggggtgtccgtgtggaaaactccctttgtgagaatggtgcgtcctaggtgttcaccaggtcgtggccgcctctactccctttctctttctccatccttctttccttaaagagtccccagtgctatctgggacatattcctccgcccagagcagggtcccgcttccctaaggccctgctctgggcttctgggtttgagtccttggcaagcccaggagaggcgctcaggcttccctgtcccccttcctcgtccaccatctcatgcccctggctctcctgccccttccctacaggggttcctggctctgctcttcagactgagccccgttcccctgcatccccgttcccctgcatcccccttcccctgcatcccccagaggccccaggccacctacttggcctggaccccacgagaggccaccccagccctgtctaccaggctgccttttgggtggattctcctccaactgtggggtgactgcttggcaaactcactcttcggggtatcccaggaggcctggagcattggggtgggctggggttcagagaggagggattcccttctcaggttacgtggccaagaagcaggggagctgggtttgggtcaggtctgggtgtggggtgaccagcttatgctgtttgcccaggacagcctagttttagcactgaaaccctcagtcctaggaaaacagggatggttggtcactgtctctgggtgactcttgattcccggccagtttctccacctggggctgtgtttctcgtcctgcatccttctccaggcaggtccccaagcatcgcccccctgctgtggctgttcccaagttcttagggtaccccacgtgggtttatcaaccacttggtgaggctggtaccctgcccccattcctgcaccccaattgccttagtggctagggggttgggggctagagtaggaggggctggagccaggattcttagggctgaacagagaagagctgggggcctgggctcctgggtttgagagaggaggggctggggcctggactcctgggtccgagggaggaggggctggggcctggactcctgggtctgagggtggagggactgggggcctggactcctgggtccgagggaggaggggctggggcctggactcgtgggtctgagggaggaggggctgggggcctggacttctgggtcttagggaggcggggctgggcctggacccctgggtctgaatggggagaggctgggggcctggactccttcatctgagggcggaagggctggggcctggcctcctgggttgaatggggaggggttgggcctggactctggagtccctggtgcccaggcctcaggcatctttcacagggatgcctgtactgggcaggtccttgaaagggaaaggcccattgctctccttgcccccctcccctatcgccatgacaactgggtggaaataaacgagccgagttcatcccgttcccagggcacgtgcggccccttcacagcccgagtttccatgacctcatgctcttggccctcgtagctccctcccgcctcctccagatgggcagctttggagaggtgagggacttggggggtaatttatcccgtggatctaggagtttagcttcactccttcctcagctccagttcaggtcccggagcccacccagtgtccacaaggcctggggcaagtccctcctccgaccccctggacttcggcttttgtccccccaagttttggacccctaagggaagaatgagaaacggtggcccgtgtcagcccctggctgcagggccccgtgcagagggggcctcagtgaactggagtgtgacagcctggggcccaggcacacaggtgtgcagctgtctcacccctctgggagtcccgcccaggcccctgagtctgtcccagcacagggtggccttcctccaccctgcatagccctgggcccacggcttcgttcctgcagagtatctgctggggtggtttccgagcttgacccttggaaggacctggctgggtttaaggcaggaggggctgggggccaggactcctggctctgaaggaggaggggctggaacctcttccctagtctgagcactggaagcgccacctgtgggtggtgacgggggttttgccgtgtctaacaggtaccatgtggggttcccgcacccagatgagaagccccctcccttccccgttcacttcctgtttgcagatagccaggagtcctttcgtggtttccactgagcactgaaggcctggccggcctgaccactgggcaaccaggcgtatcttaaacagccagtggccagaggctgttgggtcattttccccactgtcctagcaccgtgtccctggatctgttttcgtggctccctctggagtcccgacttgctgggacaccgtggctggggtaggtgcggctgacggctgtttcccacccccaggcctgcattgatgagaacctggaggtggtgcgcttcttggtggagcagggcgccactgtgaaccaggcagacaacgagggctggacgccactgcacgtggccgcctcctgtggctacctagatatcgccaggtgaggcaagggagggccgggcaggacctggtcggggtgggggcctggaccctcagccctgaccagcccccacccccaggtacctcctgagccacggggccaacatcgccgccgtcaacagtgacggggacctgcccctggacctggccgagtcggacgccatggaggggctgctgaaggcggagatcgcccgccgaggtgggctctggtgtgctgtgtgtggggtgggggacacctcctcacccgtggtctccaggctgagagctttagaggcggcctgggcaccgaggctgaccctgcttcctaggattgtctttctttgtgcctcagtttcctcacctgtgaaatgggggtgtaggggcctgcctccaggattgcttggagcccagcacacgcacaggatgagaactcaaacccctaccaactgggactgtcaatccccctgagtaactgaggggattggaatgccggggcggggtgggtgggtggagggactcacccaggagtgcgttaggtaggattgctggaaccctgccgcaggtctttctgggaggggatgcgtttacttgggggggagtaggggcatgcaggggttgccagggactggtctccctgtcctctgagactcatcgtaccccaggagccttcatatggggtccaggagcccctgaaactgtgtctggccaggttcatttttctagggaaggggtgttgcttctagcaggtgtgtgatggccacacaggatccctgggtccccagcatgtcttctaaagtcctgggcttgcctcccagctctgcctgtgactggtgactccaggcacgtccctgaagcttgcttccctgatttcctaaaacaggaccactggtgccgcttcatggggtggttgtcagggtctggctgggttggagtggaagggtgtgagcatggttcccggcagactccaggggaccgtgtggaaggaaagggagactgacgaggaaatgagataccggcagcctccgagacttctgacgcggctgtcctgacggggccgctggccaggctgaaaggataggattccgcgtgggttcaggggtccacgagagccatgcgggaggactagctagtgggacacgtgacggcggagatctgaggttcgggagcccctctttggttgaaatggggagtgggtcaaatcagccctggacctggattctgtctccttcctcctccaactttttattttgggaaagcttcagatttacagaaaagttgaagcaatagcatgtgactacccatatgactttcactaagattcgccagtgctttttcttttttgtttttgttttttagacagctttttgagatgtaattcacctaccctacaattcacccaaagtgcacacttcagtgctttttagtctattcacggggtcgggcatttatgaccacattggttgtagaacattttcatcatcccccaacgaaaccctgcaaccgcttagccatcacccccaaccatgcacccccccctcccccccaccccacgaagccctctctgccttctgtctgtggatttgctgttttgtacacttcacataaagggaatcatacagtatagaatcatcagcttttaactttttgatagatttgtgttccttctctctgtccctcccttgcgatctcttcccaggtatagacataaacacattttttcctatcctttctcctcctgtttttttccctccatctctcccttcctttcttaccaccccacccctgcctttccattcctgagccttttttttttttttgaaacagagtttcactttttgcccaggctggagtgcaatggcatgatttcggctcactgcaacctccacctcctgggttcaagcgattctcctgcctcagcttctgggtagctgagattacaggcgtgagccagcatgcccagctaattttgcatttttaatagagatggggtttcaccatgttgaccaggctggtctccaactcctgacctcaggcgatctgctggcctcggcctcgcaaagtgttgggattacaggcgtgagcccggccattctgagactgtgttgcaggcattgtacatcttcgcctgatgcacagcaggtatctcctgccacaaggaaaacctcctgcagaaccacagtagggatgcaacacgctaccccctgtgttgaccttgatgctacactctcacccaccgcaccaaccttgatgctacactctcacccaccgcaccaaccttgatgctacactctcacccaccgcaccaaccttgatgctacactctcacccaccgcaccaaccttgatgctacactctcacccaccgcaccaaccttgatgctacactctcacccactgcaccaaccttgatgctacactgttgcctgcgtttctccttgacattctttgtagcctctcccgctctggttcagggcccagctagggatccagatctgggtgatttaggctccctctgtctggatcagtcctccttttcccttggaccccagggaggccgggaatggcctccagggggtctgtgaactttctgacgttgtattttcctgcagaaattgctcataacttgcatcagcttctcagagggggccatgcttcttccctcccgtggggtgaggagaaggctgggagggatacattggtgggggatattggcttgtaggatcagccaggaacgaagaccactggggccactggaaagaccctcagccgtgctgctcggggtgggactctgcggccccaaatcacaaggcgactgcctgtgacaccctgtgacacccggctccacacaggagcctcagaggggctgcagtgcgcaggacctggatcacaggctgcaccccagctctaaggagggcgggtcttttgcaccccctgcaggacacgcccacatgatgcagaattccccgaggtgctggcatccagactggctctggccatagtgtggccctggcagccactcacaggcagggctgggagagaagacagaccggcctcaggcacgaccatccccttcgctttccctggcttacttgctgttttcctctctctgggtctggggttcagtgagagcacgtgatctgctcagccagtcacctcgtggcctggagccaccgctccctccaacaccgcaaagtcctctggcccagtcgactcaggggctgaatcgggcatgactctttgcaagaaccaaaacccgttcctcctggctcaggccggaaaaggccatttgaggcctggcacagtggctcagacctgtaagcccagcactttgggaggccaagatgggaggatctcttgagcccaggagtttgagaccagcctgggaaacctagtgagaacccatctctataaaacaaaacacattagccaggcgtgggaatgcacgtacgctcccagctactcagtaggctgaggtgagaagattgcttgagcctgggaggtggaagatgcagtgaaccacggtcactccagcctgggggcaagaccctgtctcaaccaaataaaccaaaacaaaaaaggcaatttatatacccgtgttcatagcatcgttcacaatagcccagaggtaggagcaacctagtgcccatcatcgaatgaatggaaaatcaacatgtggcccatccatgcggtgggacatgattcagtcttcatcccagcacttagggaggccgaggcgggcggatcacctgaggtcgggagtttgaggccaacctgaccaacatggagaaactctgtctctactaaaaatacaaaattagccaggggtggtggcacatccctgtaacctcagctgctcaggaggctgaggcgggagaatcactcgaacctgggaggtggaggttgtggtgagccaagatcgtgccactgcactctagcctgagcaacaagaggaaactgtgtctcaaaacaaaaaacaaaacaagacaaaacaaaaaacacacaatgtagatgtatcttgaggacattatgctaagtgaaaagtgaaaataagccagtcacagaaggacaattactgtctgattccacgtctgtgaggtacccagaatagtcaaaataatggagacagacagtagaatggctgtagtcagggactgggaggagtggggagaataggaagtagtttagtgggtacacattttttaaaatgatttttatattttttgtggagacggggtttcaccacgttgcccaagctagtctggaactcttgagctcaagtgatccacccaccttggcctcctaaagtgctgggattgcaggtgtgagccattgtccctgacctagggtacacgattttaattttgcaagatgaaaaaattctggagattggttgcacaacaaccaattgtgactacttaatgccactgaattggggttaaaatggtaaattttaggctgggcgcggtggctcaggcctgtaatccagcactttgggaggccgaggtgggcagatcacctgaggtcaggagtttgagaccagcctggccaacatggtgaaaccccgtctctgctgaaaatataaaagttagccgggcatagcgatgtacacctatagtcccagctactcgggaggctgaggcaggagaattgcttgaacccaggagatggaggttgcagtgagccgagatctcaccactgcactccagcctgggcaacagagcaagactcagcatctcaaaaaaaaaaaaaaaagatggtaaattttatactgtgtgtattttaccacatttttttcactctgagatggagtttctttatttttatttttattttttatttttttaatttatactttaagttctatggtacatgtgtacaacatgcaggtttgttacatatgtatacatgtgccatgttggtgtgctgcacccattaactcgtcatttacattaggtatatctcctaatgctgtccctccccccaccccacgacaggccccagtgtgtgatgttccccttcctgtgtccaagtgttctcattgttcatttcccacctatgagtgacaacatgcagtgtttggttttctgtccttgcgatagtttgctgagtgatggtttccagcttcatccatgtccctacaaaggacatgaattcatccttttttatggctgcatagtattccatggtgtatatgtgccacactttcttaatccagtctatcattgatggacatttgggttggttccaagtctttgctattgtgaaaaacagcagcaatggagtttcactcttgttgcccaggctggagtgcagtggcatggtcttgactcactgcaacctctgcctcccgggttcaagcaagtctcctgcctcagccttccaagtaagtgggattacaagcacccgccaccatgcccagctaatttttgtatttttagtagagatggggtttcaccatgttggccaggttggttttgaactcctgacctcagctgatccacccgtctcggccccccaaagtgctgggattacaggcgtgagtcaccgtgcctggtcacattttttttttttaaaggcagtctatggccttatgtagctgaagtccatatgggctctaggcatagcttgatccaggggcacaagtgaagtccagagcatctctctatcactctgctgaactctgttggcttcactcttagacaggttctctccgtgaggcactcagcatgggtcctactgcaggcccatatcacagccaaaacacagcacctcttgccctgtgcgtgatgctcactgggccaccttggtcagatggcagctcctgagcccatcactgttgcaaaggtgacaggaaggcctggtgatgtgcgcaccctggagccaggctatgggcccggtcacattgaaaccatatggggcaaagtgtgggtgaggaaagtcaagatgaggtcacaggggaagggagaatggattttcgtaggcccaagcagcagctgtgctgcagggacacgcagcagcaccatgtcctgtgcagaagggaccctccctggccactttgcacaggggcatggaactggcaggaagaagacatgatgtgtttttgaaacatttgaagccagctcacttggaattccagcatccaagtcagctggaagagggggagttacccttggaggcaggcggaatcgaccattggatagctccaagtgctgacaagggcggacacgggagctgatttctgcctggtgggaaaggtgatgattccagctactttgggaagtggttggtcagcatggattatagccgaaggccccagctttgccttgttctagcagttccactcctgggcagcccgagagaggccttcccaaccatgggcagatgttcatcatagtattgtttgcagtagtaagaggtcggagcccacaccaaagaggatggatcaatcactaaactctaaatgagtgatctaagcaggggtcagcaaactttctctgtaaagggctagacaatgaatgtttcaggtgttgcgggacacaccatgcctggcaccactattccactagtgctgtggagcgggagactgctagggatggtgtgtgaatgaatgggaatgactgttccatcccacgtttattgacaaaaatcgcctttcagaataggcaaatccacagggacagaaagattgctgggtgcaaggggctggcggagagggaggtctgagaagtgactttttttttttttttaagacaggatctcacgctgcctcccaggctggagtgcggtggagtgataatggctcactgcagccttgacctcgtgggcccaagtgatccttccatctcagcctcccaagtagctgagaccataggtgtgcaccaccatgcccagctaattttatttttctagagacaaggtctccctatgttgctcaggctgttctcaaactagtgggctcaagtgatctcccatcttggcctcccaaagtactgggattacaggcatgagccatggtgcctggctgggagtgacttcttcttggatacagtatccatttgggatcatgaaaaagctcaggaagtagatagtggtgatggttgcataatattggaggtatcctaaatgccactgaattgtgcactttaaaacagggaagttggtaaattttatgttgtttattttaccaccaccaccacaacaaaagataaagaaaacacaacaggtggtcaacacccacaagctatagctttctgacccctgggcaagggctctgtctacagatacagacagatctcagcaacatgttgaacacaagaagcaaattgcagaaggatgtgcagcagacatgcagagggcgctgactgtggttgaataaaaagccagtcaccctcccttcccctccctgaattgagacccattcggctataataggattgaacagttggtgactcctttaaagaaatgacacagccaggtgtggtggctcatgccggctttgggaggccaaggcaggaggatcccttgagcctgggaatttgaggcttcagtgagccataattgcaccactgtactccagcctgggtgacagtgtgaggtcctgtctcaaaaaaaaaaaaagggtcagatgcggtggctcctgcctgtaatttcagcactttgggaggccgaggcgggtggatcatgaggtcaggagttcaagaccagcctggccaacatgatgaaaccccatctctattaaaaatacaaaagttagctgggtgtggtggcgtgtgcctgtaatcccagctactcaagaagctgaggcaggagaaccgcttgaacctgggaggcagaagttgcagtgagccaagatcatgccactgcactccagcctgggtgacagagcgagaccatatatatatatatatggcctaaagtttactgagcaaatccagtgctcaattacatctaacttttcctgtcactaccaatataattttttttttttttggagacggagtctcactctatcacccaggctggagtgcagtggtgcaatctcactgcaacttccgcctccaagattcaagagatccttccgcctcagcctcccaagtaactgggattacaggcataagtcaccatgctgagctaattttggtatttttaggagagacacggtttcaacacgttgggcaggctggtctcgaactcttgacctcaggtgatctgcccaccttggtctcccaaagtgttgggattacaggcatgagccgttgtgccaccccccaatataatcttaatccagcatcttcatacattttatcaccattaccacttctgtctatatatgttacatatataggagagatatatatataggttttatatatataggaaatgtgtatatataggtgttatatatataggagatgcatatatatgttatatatatattatatatataaatattttttatatttatatttttgtatgtgtgtgtgtgtgtatatatatatatatatatacttttttttttttttttttagacagagtctcactgtgttgcccaggctggagtgcagtggcgtgatctcagctcactgcaacctccaactcccgggttcaagcgattctcctgcctcagcctcccaagtagctgggactacagccacctgccaccacacctggctaaatttttttttttttttttgtagttttagtagagatggggtttcactgtgttggccaggctggtcttgaagtcctgagctcgtgatccacctgccttggcctctcaaagttgctgggattgcaggcatgagccactgcacccggccatggttttatattaaaaataataaaaatacggtgaatttctggttgaaatggggaaaggcctgtgatctccgttttcccagtgcttagcgctgactcagagaccctgagtgggacacacgactgcatggagtacagttgggaaacaactgggctagtctgggcctcctgagtctcagaggggagcagggggaagagctctgggcaagtcactgggctgaaccctggccagcccagtgtatgaccctgggtatttcaggtcatggggtgtgagtcctacctcgtgcctcttatcctcctaggtgtggatgtggaagcagccaagcgggcagaagaggaattgctccttcatgacacgaggtgctggctgaatgggggcgccatgccagaggcccggcacccccgcacaggcgcctctgccctgcacgtggctgctgccaagggctacattgaggtgatgaggtgagttgggccagtctgttccatcttgctgtcttataccttcctgtggatcttgtcctttccctttctttttaaatgtatgtaccgaaggctatgtatttccctctaaatacagccttagctgtacccacaagttttgatgtgcagtcttttttttattgtcattcagtgtaaaatatttcccaatttgtaatcttttattatttatttattttgagacagggtcttgctatgtcacccaggctggagtgcagtggcacagtcgtggctcactgcagcctcaaactccccaggctcaggtgatcctcctacctcagcctcctgaatagtggggactacaggcgcacaccaccatgccccgctaatttttgtagagatggggtttcaccatgtggcccaggcttgtctcgaactcctgggctcaagtgatcctcctacctcagcctcccaaagtgctgggattacaggtgtaagccactgtgcttggcctaatttcaaaatatataggacttctagtcatcattttgttactattttcctggcttaattgcattgtggtcagagaatgggttccatatgattctagcttttgaaatgtatcgttttaccttatataccccagtacatgtaagtcggaaaagaatggtgtcatcaggtacagtgttctctgtaggttattaggtcaaccttgtaatcatgctgttttatttgtagtgcttctttatctttagtgatatttcacccactgcttattctgtcagttactatgagaggtgcatttaaattcttgctgtgattatggactttgtttcttcttatagttctgtcagttacaatttgtatatattttaagactagattatttggtgcatatatagtttatttttgtttgtttttgagacggagtctcgctctgtcacctaggctggagtgcagtggtgtgatcatagctcactgcaacctccacctcctgggttcaaggaattctcctgcctcagcctccccaggagctgtgactatgagagtgtgccaccacacttggctaactcgtatttctagcagagatggggtttctccatgttggccaggttgctcttgaactcctgacctcaggtaatctccctgcctcagtcttccaaaatgctggggttacaggcgtgagccactgcacccaaccaaggtgcatatatagtttaaattgttctagtacacattccctttctgtcatcctcacctcagtcttagattttgttcctatttggctgcctttcccctttctattaaagttgttggttccagttctcatcctcaggctcctcattcttttttcagttccctcttctctcttttgtgatcatatactttattatttagtataaaaatgaagttaacatgaattcctccctgtctctgctcatctctatgttgacagtttttagtcaggttttctcggtgaggtacataagatgcctctaaccgctccaggccgctgtcccttcggcttagcacctgtaacagctccaggccgctgtcccttcggcctagcacccgtaacagctccagaccgctgtcccttctgcttagcacctgctgaagcagagcccctggacctcagtgtctggccaagtcccagctctgttgctgactgggcccatccctgagctgatccttacgacaagggggactggaaactctaaatggttgggcctagtgatgtgcccaggcctggaggccgtgtccttttcctcccacggcttccacccctgagtcctgggggcggcttcatctcctgccactgcacctgcataccagccagcaggaagagagagggggcaaaggagcaaacatccattcctttcaaaagagcagtccgcaagcggcaccacttaacgccagcatcccatttgccagacgctagtcacatgaccgctcctcgctgcaaggaacagttggagatttgtcttcagctgggtggcctgtgtccggccagggggcctgtgtgggtactgttagtagagggagaaatggaatccatattcgtggaagtgaagcactttggacttagaaatattcatgactatagtgtcattgctgctcctttgtaaggggacatgtttacactcagacctactgactgcattttttattttatttttacttttgagatggagtctcgctctgttgccaggctggagtgcagtggcgcggtctcagctcactgcaacctctgtcccctgggttcaagcaattctcctgcctcaacctcctgagtagctgtgattacaggtgtgctccaccatgcccggctaatttttgtgtttgtagtagagacaggttttgccacgttggccaggctggtctcgaactcttgacctcaagtgatctgcccgcctcagcctcccagagtgctggattataggcatgagccactgtgcctagcctgactgcatttttaaaataatgtaaccagcattctcctcatcaaagatctgttgcaggctgggcgtggtggatcacgcctgtaatcccagcactttgggaggtcgaggcaggcggatcatgaggtcaggagttcaagaccagcctggctaacacagtgaaaccccgtcgctattaaaaatacaaaaaattagctgggcatggtggcaggcgcctgtaatcccagctacctggaaggctgaggcaggagaattgcttgaatccaggaggcagaggttgcagtcagtggagatcgtgccactgcactccagcctgggtgacagtgtgagactccgtctcaaaacaaaaccaaaccaaaacaaaacaaaaaaacatttgttgcagagtagaggtatatgtttatttgatgatactcattcgatgcttatttttgagcccctgctgtgtgccaggcagtctgttaggtgccagggaaatgggtaaacaagacagatctgggcctgtgtgcggctcatagcctcgtggggagacagacattttgggctgatcgctcttgctgcggggccgtcccatgcatcacaggatgtggggcagcctccctggcctccacctatgggatgttgggagcatccctggttgtgagaaccaaaaatgtctctggacgtggccaaatgtcccctggggggcagcattgccccagttgagaactgctggcttaagatataaatagggttatgggagaagacaagtgtgatgaggaggggctttggggtcaggagacagggggatgagggggtggtgactgccaaaaaggggctcagcgtgagatgctgcagggcacagaacactgcccggctgagagcagcaagtgcagaggccagcggcgagcggacgcttggggaaatagcgagggcccagcacagctggggcagggtgagctccgggcaaagcgtgggaaaggtgaagggcaaggtgggcgggaccagagagagggacttgtgcttataaggcctctttgtagaatatcccaggctgtccatctgttcccactttgtgaagctctttctcattgacacagaaactcattccagttctccaaaaatagacacgtcctaccgttaagctgagcttggagagtggccttggacttgtaaccctgcctttgccctcagattgaatggtttaaggtggttattgttttctcgcagaacactgtctcgggtgagggtttctcagcctgggcgctggcagcatgttgggtcaggtccctctccttgtggggctgctgctgagcgctctgagcgcagccgggtgtggagcagcctccctggcctccacccagccgatgccgctaacccttgccctaagttatgacaacaaagatgtctgcagacctgccgggtctcccctgggggacagcattgccctggttgggagtcactgctttaagccagcccgggtcctagagcactactgccctgagacagccctttgggggtcccatccttctgacaggcatgggggctggcaagggtcctgcacttgcatcctccggagctgcctccttacaccccgctgctgccaccttggaatcccacagccagggtgaccccctgccagcaccaggagcaggttccagaggccacctgcagggtcagggtttaacatgtaactgctggtccaaggggagggacaaggcctggtgcagaggggcctcttgtggcagcggatgctgggcagtggctctttaccagcctgtccagggacgtttcagtctcgtggcctgggacctcgttaccaaaccgctggccgaaatcagccctcggccaagggccccgccttggcctctgaccctgagcctccctggcccccaggttgctccttcaggctggctacgacccagagctccgggacggggacggctggactcccctgcacgcagcggcacactggggcgtggaggatgcctgccgcctgctggccgagcatggcgggggcatggactcactgacccatgcggtgagggccagtgcccaggctggtgaggggcagggcgtggggagggcccagcacctccttcattgtctgatcctgctcctcccctgacccaggggcagcgtccctgtgacctggccgatgaggaagtactgagcctgttggaggaactggcccggaaacaggaggacgtgagtgtcagggctgaggggcttaccccagactccccatgtcccctcagctcctcagaggagggtgcagagggggaacccccccgacttctgacacccaccaccccagcgacctgctatttccctcttggtgacccagccccagccccagcctcaggagagacccccagccggggcaggacagagatggggctgcagagcttcctgcctgcctggtggtgggggcggcagaaggatttggacagggttgtctgacaccctgatgaggttgcttagcacacctcatcacctcagggtggcccttggcagcagccatgtgcaggattgtcctagactcaggctgggctggtcacccacaaggtgtcccccagccatccccggggcagccttgctgggaaaacttagagtgaaggagtgaagggcgtgagccttggccagactgcctgggttggaatcccggctctgccatggatctgccgtgagtctcagccagccactttcctttccgggcctcagtttccttatctgtcaaatgggaatggtatggtgcgcaactgtatgaggggtcatgcgtgacacgtggattgtgctgtcaggagctcgggggagtacgtgcccctggaaagcactagagccatgccagcgttcagtgagctctgtgaggtgacaggaagctcccaaggccaggcctagggcttctggtgcgtgggcaggggagcggagacagcttcctcttttgaaaggttggcaggagcgaagtggaggctgatggatgtaggagaagatctcacacaggctggggggcaagtgtgggtgccctgaggtgcccagggaggggagcgtaaggcagggcagacccgggagggccacgagtgccaggcgaggagcatggtggcttccatcctgagggtgatacggccatgaggggtttaataggtggggcagggtcagctcagggggcccagatatggggggagaccagcctgggagcatctggggacactttctggaagacgtgagtactacagcactaagagtttgctagaagggcaggaatgaagggccctcccagtacaaaggtgtgaagacggtggtgaactgcgcggggaaggggcgaagacggtggtgaactgcggggaaggggtgaagacggtggtgaactgcgcggggaaggggcgaagacggtggtgaactgcgcggggaaggggtgaagacggtggtgaactgcgtggggaaggggcgaagacggtggtgaactgcgaactgtgcggggtaggggtgaagacggtggtgaactgcgcggggaaggtgtgaagacggtggtgaactgcgcggagaaggggcgaagacggtggtgaactgcggggaaggggtgaagacggtggtgaactgcagggaaggggtgaagacggtgaactgcggggaaggggcgaagacggtggtgaactgcagggaaggggtgaagacggtggtgaactgcgtggggaaggggtgaagacggtggtgaactgcgaactgcgcggggtaggggtgaagacggtggtgaactgcgcggggaaggtgtgaagacggtggtgaactgcgcggagaaggggtgaagacggtggtgaactgcagggaaggggtgaagacggtggtgaactgcgtggggaaggggtgaagacggtggtgaactgcgaactgcgcggggtaggggtgaagacggtggtgaactgcggggaaggggtgaagacggtggtgaactgcgcggagaaggggcgaagacggtggtgaactgcgcggggaaggggcgaagacggtggtgaactgcgcggggaaggggcgaagacagtggtgaactgcagggaaggggcgaagacggtggtgaactgcggggaaggggcgaagacggtggtgaactgcggggaaggggcgaagacggtggtgaactgcgcggggaaggggcgaagacggtggtgaactgcgcggggaaggggtgaagacggtggtgaactgcgcggggaaggggcgaagacggtggtgaactgcggggaaggtgtgaagacggtggtgaactgcgcggggaaggaggaggcgagtgccggctgcaggagccggggcagctgagggcccaccagtgccctgggtatgctgaggggtcggggtgaggtctaagcaggtctcccctgggagctagaaggacccctctggggatgagactggaggcttctcatgggtgggggccgtgaggacaagacggcagtgcctgcacgtggcagctgcgggcgcctgctggacgcagggcacctcctgcccctgaggtgtgtggccatctgtaggaaaaccagtaagcccacgagccctcggtgcccgcctgggcagtgagctcctgcacagctgtttgtggtggtgttgctgtggggcacgtgtgctccacccctcccctgcagcccccttccctccttgcagcttcggaaccaaaaagaagcttcccagagccggggccaggagccccaagcgccctctagcagcaaacacagaaggtatagggagggaggagtccagggctggcggggtggctggaggccccgggcttgtaccccagcaccctctccttccccaacaggagctctgtgtgtcgtctgagcagtcgcgagaagatttccctccaggacttgtccaaggagcgccggcctggtggggctggggggccccccatccaggacgaggatgagggggaagaaggtcccaccggtgaggggcctgaatctggactcctgggtccgagggaggaggggtcgggttctctgaatctagaggcaactggcatcttctgtgacctgcccggtgttcccacatcacagaaccaccccctgcagaacccagaaccctcaatggcgtctcctccccgccgcaccccagccctaagagtcccgtggtgagtggatgccctgagaggtcctgtgaggctgggagggcccggaggtgggattccatacagcctgtgaacctctggcaggggcagatagggggaagactatagttcccagagtcgtcctggacaaccggcttcctttttaggctgtgcctgccccgggggctgatgggaattgtagtttgttgcagtcctttgggggctaacccttgaggtctgagaagagggatcctttctctctaactgagacctcctccttctcccagcagcttgaagaggcccccttctccaggcgctttggcctcctgaagacagggagttctggtgccctgggtccccctgaaaggcggacagcggagggagcccctggggctgggctgcagcgctcggcttcctcctcctggctggaagggacctccactcaggtgagtgagggttgggccgggtccaggcccaggcccctgcccagtcgagggaactgccccttcctccccttctcctctccacacaggccaaggagctccgtcttgccagaattaccccgaccccctccccgaagctgccggagccctctgtcctgtgagtccccagggcctgggcccctcaggggtgggtggcagatgtgggttccaagcctgtccgtgtgatcctgagtgagaccatgtaccccctggggtctggttcctgccgccactccagagcctgtgctgtgttcctcttgggggctctctccctccctcaggtctgtgttgaaacgtcaccttctcccctatcttccccccaccccgaggtgcacactgaccaccctgctgccaccacggcgccgtccgcacacgcacaccctcccgctctcagttctcgcactgctgcttctgtccagagtcctttatccttctgaccggttgcgtagtgtgctggtcttttcatggcttttgtgggttttgtgtatttctgctcagctctgactctgttgtggcccagataatttgtttctttcactcacggctgcatctccagtgccggcacacaatgcacctgggtaatgtttgtggaatgaatgaattgatgcaggtctgaggtcaccaagcctcctccttgcttggagaactcctcgcctccctccaggattccggagcctgaatccccagcgaagccaaacgtccccacagcctccacggcgcccccagcggactcccgggaccgacggaggtgaagaggccagggcaggaagctgccgcccccgcccccagcagggagagacgatgtgaagcaggagtcccggggctttgggtgggctcctgagggagagctggcctcaggtctgctgggagttggagtcccctcccacagaacttgcttcccgcggagggtgtcagccacggaatgggacagggtccccaggttccctgtctgaggttgggacccttccctcaggtcctaccagatgcctgtgcgggatgaggagtcggaatcccagagaaaagctcgctcccgtctcatgcgccagtctcggaggtccacacaggtgtggggtgggctggggtctggactcctgggtctgagggaggaggggctggggcctggactcctgggtctgagggaggaggggctgggggcctggattcctgggtctgagggaggaggggctggggcctggactcctgggtctgagggaggaggggctggaggtctggactcctgggtctgagggaggaggggctggggcctggactcctgggtctgagggaggaggggctggggcctgggctcctgggtctgagggaggaggggctggggcctggactcctgggtctgagggaggaggggctggaggtctggactcctgggtctgagggaggaggggctggggcctggactcctgggtctgagggaggaggggctggggcctgggctcctgggtctgagggaggaggggctggggcctggactcctgggtctgagggaggaggggctggggtctgggctcctgggtctgagggaggaggggctggaggtctggactcctgggtctgagggaggaggggctggggcctggactcctgggtctgagggaggaggggctggggtctgggctcctgggtctgagggaggaggggctggggcctgggctcctgggtctgagggaggaggggctggggtctgggctcctgggtctgagggaggaggggctggggcctgggctcctgggtctgagggaggaggggctggggtctgggctcctgggtctgagggaggaggggctggaggtctggactcctgggtctgagggaggaggggctggggcctgggctcctgggtctgagggaggaggggctggaggtctggactcctgggtctgagggaggaggggctggggcctggactcctgggtctgagggaggaggggctggaggtctggactcctgggtctgagggaggaggggctggggcctggactcctgggtctgagggaggaggggctggaggtctggactcctgggtctgagggaggaggggctggggtctgggctcctgggtctgagggaggaggggctggggcctgggctcctgggtctgagggaggaggggctgggccctgaccccagcgtcccctgactgtcccctttccctgccagggtgtgactcttacagacctgaaggaggcagagaaggctgcagggaaggccccagagtcagagaagccggcgcagagcctggtgagaggggtcagcgagggcgagtggggtggtgcgggatgtcctgcttccctgactcgcctccccctcccgacaggacccttcccgaaggccccgcgtccctggagtggagaactctgacagccctgcccagagaggtgaggtctgctctcggggaggtcattcccagggaatcatccagtttctcccatagtcttcttgctttcctgggggcttgacccggggacccaggcaccgagagggggctctggaggtgcctgggctgattcctgcccctcccccagcagaggcgcccgacgggcagggtccgggaccgcaggcggccagggagcaccgcaaggtcggaaaggagtggagggggcctgcggaggtgaggggctcaggtggggccgagctggtgcagagggtgggccggggggcgggcaaagcccttcccatacccgctaaagtccctcccatacccattgaacccccgtctacctgcccacagggggaggaggcggagccggctgaccgcagccaggagtccaggtaggggcggggtgggagaggtggggtctgcgtgcgggccgggccggcccctgacgcgcgctcctcccctgccccagcaccctggagggcggcccctcggcccgcaggcagcggtggcagcgggacctcaacccagaacctgagccagaatcggaagagccagacggaggctttaggacggtgcgatcccacccctccgtcggggctttgcctgctgggtgcccagcttcctggcttccccgcccccccagcatcgccccatcctccacctgaccctcctctacctgacccccagctgtatgcagagctgcgcagggagaacgagcggcttcgcgaggccctgaccgagaccacgctgcggctggcgcagctcaaggtggagctggagcgggccacgcaggtaagggcgccgaggccagggtcacgggaactggcagggccgcctgggtggggcttagactgctgggaggtagagcctggcctgggggtgccggcggggctgggcttcacttgaggggcggggccgagatctcggaggcggagtctgagcgaggggatggggctgtgggcctgccggtggcggggcctggcccgtgggggaagggcttgtgggctgcctagtgggcgggcgggtgcccagcaggagcctaggacccttcagagcagtgctggcttcttctgctgacccctgtgctttctgtgtcctcaccagaggcaagaacgcttcgctgagaggccagccctcctggaactggagagattcgtgagtaggggcagtggggatgggggccagaggcgtccccagcctcacatccctaagtttggaccaagggagccacattgcccttcccagctggcccctggccttcccctgccctcctcagcctcactcagtttctgcactttccctgttcattccaggagcgcagggccctggaacgcaaggccgcagagctggaggaggagctgaaggtgggggctgtgggggctgtgggcagagggccgagggtgggtgggggtgcaacccgccagggctgcccagctgacccttgccgtcccccaggccctgtctgacctccgcgctgacaaccagcgcctcaaggatgagaatgcagcgttgatccgcgtcatcagcaaactctccaagtgacccggagggactttcccgcacccgtatttatacagctgcttctgccacacgcaccccttcccccgtgtgaacacgagtgacagggctccgggggaagtctcagagaagccatagcccccctgggacctccggactgggaggggagcagagtccccaggagccgagggggccacccgaggccaggatggaggtgggaggccgagccaagcagggggacgttgccagaggggaccagggccagagacgggaccaggaaggaactgaggaccaagaagtgcaaggatcagtagccaggaccagagtggccgcctggaggtccccatctcacgtgtgatgccaccccgtcacccctcccctcctgagcagggatccaagaatgtgccaagagtcccgccagcctcagccaggtgggcctgtatatagggtccatgtgcaatagggagggacgtcttctattttttgctgccccctccccgcccactgtctggggcagggggagaaggtattttcgagataaagcacaggcaccacaaataaaagtcgtgaagttgccactcaa

SEQ ID NO: 63 - protein, 16 aa, Artificial Sequence
  Description of Artificial Sequence: Synthetic peptide
KRPAATKKAGQAKKKK

SEQ ID NO: 64 - protein, 9 aa, Artificial Sequence
  Description of Artificial Sequence: Synthetic peptide
PAAKRVKLD

SEQ ID NO: 65 - protein, 11 aa, Artificial Sequence
  Description of Artificial Sequence: Synthetic peptide
RQRRNELKRSP

SEQ ID NO: 66 - protein, 38 aa, Artificial Sequence
  Description of Artificial Sequence: Synthetic polypeptide
NQSSNFGPMKGGNFGGRSSGPYGGGGQYFAKPRNQGGY

SEQ ID NO: 67 - protein, 42 aa, Artificial Sequence
  Description of Artificial Sequence: Synthetic polypeptide
RMRIZFKNKGKDTAELRRRRVEVSVELRKAKKDEQILKRRNV

SEQ ID NO: 68 - protein, 8 aa, Artificial Sequence
  Description of Artificial Sequence: Synthetic peptide
VSRKRPRP

SEQ ID NO: 69 - protein, 8 aa, Artificial Sequence
  Description of Artificial Sequence: Synthetic peptide
PPKKARED

SEQ ID NO: 70 - protein, 8 aa, Artificial Sequence
  Description of Artificial Sequence: Synthetic peptide
PQPKKKPL

SEQ ID NO: 71 - protein, 12 aa, Artificial Sequence
  Description of Artificial Sequence: Synthetic peptide
SALIKKKKKMAP

SEQ ID NO: 72 - protein, 5 aa, Artificial Sequence
  Description of Artificial Sequence: Synthetic peptide
DRLRR

SEQ ID NO: 73 - protein, 7 aa, Artificial Sequence
  Description of Artificial Sequence: Synthetic peptide
PKQKKRK

SEQ ID NO: 74 - protein, 10 aa, Artificial Sequence
  Description of Artificial Sequence: Synthetic peptide
RKLKKKIKKL

SEQ ID NO: 75 - protein, 10 aa, Artificial Sequence
  Description of Artificial Sequence: Synthetic peptide
REKKKFLKRR

SEQ ID NO: 76 - protein, 20 aa, Artificial Sequence
  Description of Artificial Sequence: Synthetic peptide
KRKGDEVDGVDEVAKKKSKK

SEQ ID NO: 77 - protein, 17 aa, Artificial Sequence
  Description of Artificial Sequence: Synthetic peptide
RKCLQAGMNLEARKTKK

SEQ ID NO: 78 - RNA, 100 nt, Artificial Sequence
  Description of Artificial Sequence: Synthetic polynucleotide
ucucucagcugguacacggcguuuuagagcuagaaauagcaaguuaaaauaaggcuaguccguuaucaacuugaaaaaguggcaccgagucggugcuuuu

SEQ ID NO: 79 - RNA, 100 nt, Artificial Sequence; identical to SEQ ID NO: 78
  Description of Artificial Sequence: Synthetic polynucleotide

SEQ ID NO: 80 - DNA, 20 bp, Homo sapiens
gccgtgtaccagctgagaga

SEQ ID NO: 81 - RNA, 20 nt, Artificial Sequence
  Description of Artificial Sequence: Synthetic oligonucleotide
ucucucagcugguacacggc

SEQ ID NO: 82 - RNA, 100 nt, Artificial Sequence
  Description of Artificial Sequence: Synthetic polynucleotide
gggaggcguucgggccacagguuuuagagcuagaaauagcaaguuaaaauaaggcuaguccguuaucaacuugaaaaaguggcaccgagucggugcuuuu

SEQ ID NO: 83 - RNA, 100 nt, Artificial Sequence; identical to SEQ ID NO: 82
  Description of Artificial Sequence: Synthetic polynucleotide

SEQ ID NO: 84 - RNA, 20 nt, Artificial Sequence
  Description of Artificial Sequence: Synthetic oligonucleotide
gggaggcguucgggccacag

SEQ ID NO: 85 - DNA, 20 bp, Unknown
  Description of Unknown: T1 target sequence
ctgtggcccgaacgcctccc

SEQ ID NO: 86 - DNA, 20 bp, Homo sapiens
ctagggacaggattggtgac

SEQ ID NO: 87 - protein, 239 aa, Artificial Sequence
  Description of Artificial Sequence: Synthetic polypeptide
MVSKGEELFTGVVPILVELDGDVNGHKFSVSGEGEGDATYGKLTLKFICTTGKLPVPWPTLVTTLTYGVQCFSRYPDHMKQHDFFKSAMPEGYVQERTIFFKDDGNYKTRAEVKFEGDTLVNRIELKGIDFKEDGNILGHKLEYNYNSHNVYIMADKQKNGIKVNFKIRHNIEDGSVQLADHYQQNTPIGDGPVLLPDNHYLSTQSALSKDPNEKRDHMVLLEFVTAAGITLGMDELYK

SEQ ID NO: 88 - DNA, 6898 bp, Artificial Sequence
  Description of Artificial Sequence: Synthetic polynucleotide
acattaccctgttatccctagatgacattaccctgttatcccagatgacattaccctgttatccctagatgacattaccctgttatccctagatgacatttaccctgttatccctagatgacattaccctgttatcccagatgacattaccctgttatccctagatacattaccctgttatcccagatgacataccctgttatccctagatgacattaccctgttatcccagatgacattaccctgttatccctagatacattaccctgttatcccagatgacataccctgttatccctagatgacattaccctgttatcccagatgacattaccctgttatccctagatacattaccctgttatcccagatgacataccctgttatccctagatgacattaccctgttatcccagatgacattaccctgttatccctagatacattaccctgttatcccagatgacataccctgttatccctagatgacattaccctgttatcccagatgacattaccctgttatccctagatacattaccctgttatcccagatgacataccctgttatccctagatgacattaccctgttatcccagatgacattaccctgttatccctagatacattaccctgttatcccagatgacataccctgttatccctagatgacattaccctgttatcccagataaactcaatgatgatgatgatgatggtcgagactcagcggccgcggtgccagggcgtgcccttgggctccccgggcgcgactagtgaattctgctttctctgacctgcattctctcccctgggcctgtgccgctttctgtctgcagcttgtggcctgggtcacctctacggctggcccagatccttccctgccgcctccttcaggttccgtcttcctccactccctcttccccttgctctctgctgtgttgctgcccaaggatgctctttccggagcacttccttctcggcgctgcaccacgtgatgtcctctgagcggatcctccccgtgtctgggtcctctccgggcatctctcctccctcacccaaccccatgccgtcttcactcgctgggttcccttttccttctccttctggggcctgtgccatctctcgtttcttaggatggccttctccgacggatgtctcccttgcgtcccgcctccccttcttgtaggcctgcatcatcaccgtttttctggacaaccccaaagtaccccgtctccctggctttagccacctctccatcctcttgctttctttgcctggacaccccgttctcctgtggattcgggtcacctctcactcctttcatttgggcagctcccctaccccccttacctctctagtctgtgctagctcttccagccccctgtcatggcatcttccaggggtccgagagctcagctagtcttcttcctccaacccgggcccctatgtccacttcaggacagcatgtttgctgcctccagggatcctgtgtccccgagctgggaccaccttatattcccagggccggttaatgtggctctggttctgggtacttttatctgtcccctccaccccacagtggggccactagggacagcgatcgggtacatcgatcgcaggcgcaatcttcgcatttcttttttccagatggtgagcaagggcgaggagctgttcaccggggtggtgcccatcctggtcgagctggacggcgacgtaaacggccacaagttcagcgtgtccggcgagggcgagggcgatgccacctacggcaagctgaccctgaagttcatctgcaccaccggcaagctgcccgtgccctggcccaccctcgtgaccaccctgacctacggcgtgcagtgcttcagccgctaccccgaccacatgaagcagcacgacttcttcaagtccgccatgcccgaaggctacgtccaggagcgcaccatcttcttcaaggacgacggcaactacaagacccgcgccgaggtgaagttcgagggcgacaccctggtgaaccgcatcgagctgaagggcatcgacttcaaggaggacggcaacatcctggggcacaagctggagtacaactacaacagccacaacgtctatatcatggccgacaagcagaagaacggcatcaaggtgaacttcaagatccgccacaacatcgaggacggcagcgtgcagctcgccgaccactaccagcagaacacccccatcggcgacggccccgtgctgctgcccgacaaccactacctgagcacccagtccgccctgagcaaagaccccaacgagaagcgcgatcacatggtcctgctggagttcgtgaccgccgccgggatcactctcggcatggacgagctgtacaagtaacgcggccgcctgtgccttctagttgccagccatctgttgtttgcccctcccccgtgccttccttgaccctggaaggtgccactcccactgtcctttcctaataaaatgaggaaattgcatcgcattgtctgagtaggtgtcattctattctggggggtggggtggggcaggacagcaagggggaggattgggaagacaatagcaggcatgctggggatgcggtgggctctatgggattggtgacagaaaagccccatccttaggcctcctccttcctagtctcctgatattgggtctaacccccacctcctgttaggcagattccttatctggtgacacacccccatttcctggagccatctctctccttgccagaacctctaaggtttgcttacgatggagccagagaggatcctgggagggagagcttggcagggggtgggagggaagggggggatgcgtgacctgcccggttctcagtggccaccctgcgctaccctctcccagaacctgagctgctctgacgcggctgtctggtgcgtttcactgatcctggtgctgcagcttccttacacttcccaagaggagaagcagtttggaaaaacaaaatcagaataagttggtcctgagttctaactttggctcttcacctttctagtccccaatttatattgttcctccgtgcgtcagttttacctgtgagataaggccagtagccagccccgtcctggcagggctgtggtgaggaggggggtgtccgtgtggaaaactccctttgtgagaatggtgcgtcctaggtgttcaccaggtcgtggccgcctctactccctttctctttctccatccttctttccttaaagagtccccagtgctatctgggacatattcctccgcccagagcagggtcccgcttccctaaggccctgctctgggcttctgggtttgagtccttggcaagcccaggagaggcgctcaggcttccctgtcccccttcctcgtccaccatctcatgcccctggctctcctgccccttccctacaggggttcctggctctgctcttcagactgagccccgttcccctgcatccccgttcccctgcatcccccttcccctgcatcccccagaggccccaggccacctacttggcctggaccccacgagaggccaccccagccctgtctaccaggctgccttttgggtggattctcctccaactgtggggtgactgcttgggatatctctagagtcgacccatgggggcccgccccaactggggtaacctttgagttctctcagttgggggtaatcagcatcatgatgtggtaccacatcatgatgctgattataagaatgcggccgccacactctagtggatctcgagttaataattcagaagaactcgtcaagaaggcgatagaaggcgatgcgctgcgaatcgggagcggcgataccgtaaagcacgaggaagcggtcagcccattcgccgccaagctcttcagcaatatcacgggtagccaacgctatgtcctgatagcggtccgccacacccagccggccacagtcgatgaatccagaaaagcggccattttccaccatgatattcggcaagcaggcatcgccatgggtcacgacgagatcctcgccgtcgggcatgctcgccttgagcctggcgaacagttcggctggcgcgagcccctgatgctcttcgtccagatcatcctgatcgacaagaccggcttccatccgagtacgtgctcgctcgatgcgatgtttcgcttggtggtcgaatgggcaggtagccggatcaagcgtatgcagccgccgcattgcatcagccatgatggatactttctcggcaggagcaaggtgtagatgacatggagatcctgccccggcacttcgcccaatagcagccagtcccttcccgcttcagtgacaacgtcgagcacagctgcgcaaggaacgcccgtcgtggccagccacgatagccgcgctgcctcgtcttgcagttcattcagggcaccggacaggtcggtcttgacaaaaagaaccgggcgcccctgcgctgacagccggaacacggcggcatcagagcagccgattgtctgttgtgcccagtcatagccgaatagcctctccacccaagcggccggagaacctgcgtgcaatccatcttgttcaatcatgcgaaacgatcctcatcctgtctcttgatcagagcttgatcccctgcgccatcagatccttggcggcgagaaagccatccagtttactttgcagggcttcccaaccttaccagagggcgccccagctggcaattccggttcgcttgctgtccataaaaccgcccagtctagctatcgccatgtaagcccactgcaagctacctgctttctctttgcgcttgcgttttcccttgtccagatagcccagtagctgacattcatccggggtcagcaccgtttctgcggactggctttctacgtgctcgaggggggccaaacggtctccagcttggctgttttggcggatgagagaagattttcagcctgatacagattaaatcagaacgcagaagcggtctgataaaacagaatttgcctggcggcagtagcgcggtggtcccacctgaccccatgccgaactcagaagtgaaacgccgtagcgccgatggtagtgtggggtctccccatgcgagagtagggaactgccaggcatcaaataaaacgaaaggctcagtcgaaagactgggcctttcgttttatctgttgtttgtcggtgaacgctctcctgagtaggacaaatccgccgggagcggatttgaacgttgcgaagcaacggcccggagggtggcgggcaggacgcccgccataaactgccaggcatcaaattaagcagaaggccatcctgacggatggcctttttgcgtttctacaaactcttttgtttatttttctaaatacattcaaatatgtatccgctcatgaccaaaatcccttaacgtgagttttcgttccactgagcgtcagaccccgtagaaaagatcaaaggatcttcttgagatcctttttttctgcgcgtaatctgctgcttgcaaacaaaaaaaccaccgctaccagcggtggtttgtttgccggatcaagagctaccaactctttttccgaaggtaactggcttcagcagagcgcagataccaaatactgtccttctagtgtagccgtagttaggccaccacttcaagaactctgtagcaccgcctacatacctcgctctgctaatcctgttaccagtggctgctgccagtggcgataagtcgtgtcttaccgggttggactcaagacgatagttaccggataaggcgcagcggtcgggctgaacggggggttcgtgcacacagcccagcttggagcgaacgacctacaccgaactgagatacctacagcgtgagctatgagaaagcgccacgcttcccgaagggagaaaggcggacaggtatccggtaagcggcagggtcggaacaggagagcgcacgagggagcttccagggggaaacgcctggtatctttatagtcctgtcgggtttcgccacctctgacttgagcgtcgatttttgtgatgctcgtcaggggggcggagcctatggaaaaacgccagcaacgcggcctttttacggttcctggccttttgctggccttttgctcacatgttctttcctgcgttatcccctgattctgtggataaccgtattaccgcctttgagtgagctgataccgctcgccgcagccgaacgaccgagcgcagcgagtcagtgagcgaggaagcggaagagcgcctgatgcggtattttctccttacgcatctgtgcggtatttcacaccgcatatggtgcactctcagtacaatctgctctgatgccgcatagttaagccagtatacactccgctatcgctacgtgactgggtcatggctgcgccccgacacccgccaacacccgctgacgcgccctgacgggcttgtctgctcccggcatccgcttacagacaagctgtgaccgtctccgggagctgcatgtgtcagaggttttcaccgtcatcaccgaaacgcgcgaggcagcagatcaattcgcgcgcgaaggcgaagcggcatgcataatgtgcctgtcaaatggacgaagcagggattctgcaaaccctatgctactccgtcaagccgtcaattgtctgattcgttaccaattatgacaacttgacggctacatcattcactttttcttcacaaccggcacggaactcgctcgggctggccccggtgcattttttaaatacccgcgagaaatagagttgatcgtcaaaaccaacattgcgaccgacggtggcgataggcatccgggtggtgctcaaaagcagcttcgcctggctgatacgttggtcctcgcgccagcttaagacgctaatccctaactgctggcggaaaagatgtgacagacgcgacggcgacaagcaaacatgctgtgcgacgctggcgat

SEQ ID NO: 89 - DNA, 5194 bp, Artificial Sequence
  Description of Artificial Sequence: Synthetic polynucleotide
acattaccctgttatccctagatgacattaccctgttatcccagatgacattaccctgttatccctagatgacattaccctgttatccctagatgacatttaccctgttatccctagatgacattaccctgttatcccagatgacattaccctgttatccctagatacattaccctgttatcccagatgacataccctgttatccctagatgacattaccctgttatcccagatgacattaccctgttatccctagatacattaccctgttatcccagatgacataccctgttatccctagatgacattaccctgttatcccagatgacattaccctgttatccctagatacattaccctgttatcccagatgacataccctgttatccctagatgacattaccctgttatcccagatgacattaccctgttatccctagatacattaccctgttatcccagatgacataccctgttatccctagatgacattaccctgttatcccagatgacattaccctgttatccctagatacattaccctgttatcccagatgacataccctgttatccctagatgacattaccctgttatcccagatgacattaccctgttatccctagatacattaccctgttatcccagatgacataccctgttatccctagatgacattaccctgttatcccagataaactcaatgatgatgatgatgatggtcgagactcagcggccgcggtgccagggcgtgcccttgggctccccgggcgcgactagtgggaggcgttcgggccacagcggcccgttctgggtacttttatctgtcccctccaccccacagtggggccactacgatcgatcgatcgcaggcgcaatcttcgcatttcttttttccagatggtgagcaagggcgaggagctgttcaccggggtggtgcccatcctggtcgagctggacggcgacgtaaacggccacaagttcagcgtgtccggcgagggcgagggcgatgccacctacggcaagctgaccctgaagttcatctgcaccaccggcaagctgcccgtgccctggcccaccctcgtgaccaccctgacctacggcgtgcagtgcttcagccgctaccccgaccacatgaagcagcacgacttcttcaagtccgccatgcccgaaggctacgtccaggagcgcaccatcttcttcaaggacgacggcaactacaagacccgcgccgaggtgaagttcgagggcgacaccctggtgaaccgcatcgagctgaagggcatcgacttcaaggaggacggcaacatcctggggcacaagctggagtacaactacaacagccacaacgtctatatcatggccgacaagcagaagaacggcatcaaggtgaacttcaagatccgccacaacatcgaggacggcagcgtgcagctcgccgaccactaccagcagaacacccccatcggcgacggccccgtgctgctgcccgacaaccactacctgagcacccagtccgccctgagcaaagaccccaacgagaagcgcgatcacatggtcctgctggagttcgtgaccgccgccgggatcactctcggcatggacgagctgtacaagtaattaattaatgagcggccgcgtttcagacatgataagatacattgatgagtttggacaaaccacaactagaatgcagtgaaaaaaatgctttatttgtgaaatttgtgatgctattgctttatttgtaaccattataagctgcaataaacaagttaacaacaacaattgcattcattttatgtttcaggttcagggggaggtgtgggaggttttttgacgtcgggacaggattggtgacagaaaagccccatccttaggcctcctccttcaaaccgctgtggcccgaacgcctcccgtcgacccatgggggcccgccccaactggggtaacctttgagttctctcagttgggggtaatcagcatcatgatgtggtaccacatcatgatgctgattataagaatgcggccgccacactctagtggatctcgagttaataattcagaagaactcgtcaagaaggcgatagaaggcgatgcgctgcgaatcgggagcggcgataccgtaaagcacgaggaagcggtcagcccattcgccgccaagctcttcagcaatatcacgggtagccaacgctatgtcctgatagcggtccgccacacccagccggccacagtcgatgaatccagaaaagcggccattttccaccatgatattcggcaagcaggcatcgccatgggtcacgacgagatcctcgccgtcgggcatgctcgccttgagcctggcgaacagttcggctggcgcgagcccctgatgctcttcgtccagatcatcctgatcgacaagaccggcttccatccgagtacgtgctcgctcgatgcgatgtttcgcttggtggtcgaatgggcaggtagccggatcaagcgtatgcagccgccgcattgcatcagccatgatggatactttctcggcaggagcaaggtgtagatgacatggagatcctgccccggcacttcgcccaatagcagccagtcccttcccgcttcagtgacaacgtcgagcacagctgcgcaaggaacgcccgtcgtggccagccacgatagccgcgctgcctcgtcttgcagttcattcagggcaccggacaggtcggtcttgacaaaaagaaccgggcgcccctgcgctgacagccggaacacggcggcatcagagcagccgattgtctgttgtgcccagtcatagccgaatagcctctccacccaagcggccggagaacctgcgtgcaatccatcttgttcaatcatgcgaaacgatcctcatcctgtctcttgatcagagcttgatcccctgcgccatcagatccttggcggcgagaaagccatccagtttactttgcagggcttcccaaccttaccagagggcgccccagctggcaattccggttcgcttgctgtccataaaaccgcccagtctagctatcgccatgtaagcccactgcaagctacctgctttctctttgcgcttgcgttttcccttgtccagatagcccagtagctgacattcatccggggtcagcaccgtttctgcggactggctttctacgtgctcgaggggggccaaacggtctccagcttggctgttttggcggatgagagaagattttcagcctgatacagattaaatcagaacgcagaagcggtctgataaaacagaatttgcctggcggcagtagcgcggtggtcccacctgaccccatgccgaactcagaagtgaaacgccgtagcgccgatggtagtgtggggtctccccatgcgagagtagggaactgccaggcatcaaataaaacgaaaggctcagtcgaaagactgggcctttcgttttatctgttgtttgtcggtgaacgctctcctgagtaggacaaatccgccgggagcggatttgaacgttgcgaagcaacggcccggagggtggcgggcaggacgcccgccataaactgccaggcatcaaattaagcagaaggccatcctgacggatggcctttttgcgtttctacaaactcttttgtttatttttctaaatacattcaaatatgtatccgctcatgaccaaaatcccttaacgtgagttttcgttccactgagcgtcagaccccgtagaaaagatcaaaggatcttcttgagatcctttttttctgcgcgtaatctgctgcttgcaaacaaaaaaaccaccgctaccagcggtggtttgtttgccggatcaagagctaccaactctttttccgaaggtaactggcttcagcagagcgcagataccaaatactgtccttctagtgtagccgtagttaggccaccacttcaagaactctgtagcaccgcctacatacctcgctctgctaatcctgttaccagtggctgctgccagtggcgataagtcgtgtcttaccgggttggactcaagacgatagttaccggataaggcgcagcggtcgggctgaacggggggttcgtgcacacagcccagcttggagcgaacgacctacaccgaactgagatacctacagcgtgagctatgagaaagcgccacgcttcccgaagggagaaaggcggacaggtatccggtaagcggcagggtcggaacaggagagcgcacgagggagcttccagggggaaacgcctggtatctttatagtcctgtcgggtttcgccacctctgacttgagcgtcgatttttgtgatgctcgtcaggggggcggagcctatggaaaaacgccagcaacgcggcctttttacggttcctggccttttgctggccttttgctcacatgttctttcctgcgttatcccctgattctgtggataaccgtattaccgcctttgagtgagctgataccgctcgccgcagccgaacgaccgagcgcagcgagtcagtgagcgaggaagcggaagagcgcctgatgcggtattttctccttacgcatctgtgcggtatttcacaccgcatatggtgcactctcagtacaatctgctctgatgccgcatagttaagccagtatacactccgctatcgctacgtgactgggtcatggctgcgccccgacacccgccaacacccgctgacgcgccctgacgggcttgtctgctcccggcatccgcttacagacaagctgtgaccgtctccgggagctgcatgtgtcagaggttttcaccgtcatcaccgaaacgcgcgaggcagcagatcaattcgcgcgcgaaggcgaagcggcatgcataatgtgcctgtcaaatggacgaagcagggattctgcaaaccctatgctactccgtcaagccgtcaattgtctgattcgttaccaattatgacaacttgacggctacatcattcactttttcttcacaaccggcacggaactcgctcgggctggccccggtgcattttttaaatacccgcgagaaatagagttgatcgtcaaaaccaacattgcgaccgacggtggcgataggcatccgggtggtgctcaaaagcagcttcgcctggctgatacgttggtcctcgcgccagcttaagacgctaatccctaactgctggcggaaaagatgtgacagacgcgacggcgacaagcaaacatgctgtgcgacgctggcgat

SEQ ID NO: 90 - DNA, 6480 bp, Artificial Sequence
  Description of Artificial Sequence: Synthetic polynucleotide
acattaccctgttatccctagatgacattaccctgttatcccagatgacattaccctgttatccctagatgacattaccctgttatccctagatgacatttaccctgttatccctagatgacattaccctgttatcccagatgacattaccctgttatccctagatacattaccctgttatcccagatgacataccctgttatccctagatgacattaccctgttatcccagatgacattaccctgttatccctagatacattaccctgttatcccagatgacataccctgttatccctagatgacattaccctgttatcccagatgacattaccctgttatccctagatacattaccctgttatcccagatgacataccctgttatccctagatgacattaccctgttatcccagatgacattaccctgttatccctagatacattaccctgttatcccagatgacataccctgttatccctagatgacattaccctgttatcccagatgacattaccctgttatccctagatacattaccctgttatcccagatgacataccctgttatccctagatgacattaccctgttatcccagatgacattaccctgttatccctagatacattaccctgttatcccagatgacataccctgttatccctagatgacattaccctgttatcccagataaactcaatgatgatgatgatgatggtcgagactcagcggccgcggtgccagggcgtgcccttgggctccccgggcgcgactagtgaattcgggaggcgttcgggccacagcggccctaaccctgatcctcttgtcccacagatatccagaaccctgaccctgccggttctggcgagggcaggggttccctccttacatgcggagatgtagaagaaaatccagggcctatggccctgcccgtcaccgctctgctgctgcctctggctctgctgctgcatgccgctcgccccggaagtcaggtccagctgcagcagagcggacctgagctggagaagccaggagcatccgtgaagatctcttgcaaggcctctggctacagcttcaccggctatacaatgaactgggtgaagcagagccacggcaagtccctggagtggatcggcctgatcaccccctacaacggcgccagctcctataatcagaagtttcgcggcaaggccaccctgacagtggacaagtctagctccaccgcctatatggacctgctgtccctgacatctgaggatagcgccgtgtacttctgcgcaaggggaggatatgacggaaggggctttgattactggggccagggcaccacagtgaccgtgtctagcggaggaggaggatccggaggaggaggatcctctggcggcggcagcgacatcgagctgacacagtccccagcaatcatgtctgccagcccaggagagaaggtgaccatgacatgttctgccagctcctctgtgagctacatgcactggtatcagcagaagtccggcacctctcccaagcggtggatctatgatacatctaagctggcaagcggagtgcctggccggttctccggctctggcagcggcaattcctactctctgaccatcagctccgtggaggccgaggacgatgccacatactattgccagcagtggtccaagcaccctctgacctacggcgccggcacaaagctggagatcaaggcctctaccacaaccccagcacccagaccccctacccctgcaccaacaatcgcatcccagccactgagcctgcggcccgaggcctgtaggccagcagcaggaggagcagtgcacaccaggggcctggacttcgcctgcgatttttgggtgctggtggtggtgggaggcgtgctggcctgttatagcctgctggtgacagtggccttcatcatcttttgggtgagaagcaagagatccaggctgctgcactccgactacatgaacatgacccctagacggcccggccctacaaggaagcactaccagccatatgccccacccagagattttgccgcctataggagcaagcgcggccggaagaagctgctgtacatcttcaagcagcccttcatgcggcccgtgcagacaacccaggaggaggacggctgctcctgtaggttcccagaagaggaggagggaggatgcgagctgagggtgaagtttagccggtccgccgatgcaccagcatataagcagggacagaatcagctgtacaacgagctgaatctgggcaggcgcgaggagtacgacgtgctggataagaggagaggacgggaccccgagatgggaggcaagcccaggcgcaagaaccctcaggagggcctgtataatgagctgcagaaggacaagatggccgaggcctactctgagatcggcatgaagggagagcggagaaggggcaagggacacgatggcctgtatcagggcctgtccaccgccacaaaggacacctacgatgccctgcacatgcaggccctgcctccaaggagggcaaagaggggatccggagagggacggggctctctgctgacctgcggcgatgtggaggagaacccaggccccatgggcacaagcctgctgtgctggatggcactgtgcctgctgggagcagaccacgccgatgcctgcccctattctaatcccagcctgtgctccggaggaggaggatctgagctgcctacccagggcacattctctaacgtgagcaccaatgtgagcccagccaagcccacaaccacagcctgcccatactccaaccccagcctgtgcagcggcggaggaggcagccctgcaccaagaccccctaccccagcacctacaatcgcaagtcagcctctgagcctgcggcccgaggcctgtcgccctgccgccggcggcgccgtccatactaggggcctggactttgcctgcgatatctacatctgggcaccactggcaggaacctgtggcgtgctgctgctgagcctggtcatcacactgtattgtaatcataggaatcggaggagagtgtgcaaatgcccccgccctgtcgtctaaaccggtaataaaagatccttattttcattggatctgtgtgttggttttttgtgtgagcgctagctgagactctaaatccagtgacaagtctgtctgcctaaaaccgctgtggcccgaacgcctcccgatatcgtcgacccatgggggcccgccccaactggggtaacctttgagttctctcagttgggggtaatcagcatcatgatgtggtaccacatcatgatgctgattataagaatgcggccgccacactctagtggatctcgagttaataattcagaagaactcgtcaagaaggcgatagaaggcgatgcgctgcgaatcgggagcggcgataccgtaaagcacgaggaagcggtcagcccattcgccgccaagctcttcagcaatatcacgggtagccaacgctatgtcctgatagcggtccgccacacccagccggccacagtcgatgaatccagaaaagcggccattttccaccatgatattcggcaagcaggcatcgccatgggtcacgacgagatcctcgccgtcgggcatgctcgccttgagcctggcgaacagttcggctggcgcgagcccctgatgctcttcgtccagatcatcctgatcgacaagaccggcttccatccgagtacgtgctcgctcgatgcgatgtttcgcttggtggtcgaatgggcaggtagccggatcaagcgtatgcagccgccgcattgcatcagccatgatggatactttctcggcaggagcaaggtgtagatgacatggagatcctgccccggcacttcgcccaatagcagccagtcccttcccgcttcagtgacaacgtcgagcacagctgcgcaaggaacgcccgtcgtggccagccacgatagccgcgctgcctcgtcttgcagttcattcagggcaccggacaggtcggtcttgacaaaaagaaccgggcgcccctgcgctgacagccggaacacggcggcatcagagcagccgattgtctgttgtgcccagtcatagccgaatagcctctccacccaagcggccggagaacctgcgtgcaatccatcttgttcaatcatgcgaaacgatcctcatcctgtctcttgatcagagcttgatcccctgcgccatcagatccttggcggcgagaaagccatccagtttactttgcagggcttcccaaccttaccagagggcgccccagctggcaattccggttcgcttgctgtccataaaaccgcccagtctagctatcgccatgtaagcccactgcaagctacctgctttctctttgcgcttgcgttttcccttgtccagatagcccagtagctgacattcatccggggtcagcaccgtttctgcggactggctttctacgtgctcgaggggggccaaacggtctccagcttggctgttttggcggatgagagaagattttcagcctgatacagattaaatcagaacgcagaagcggtctgataaaacagaatttgcctggcggcagtagcgcggtggtcccacctgaccccatgccgaactcagaagtgaaacgccgtagcgccgatggtagtgtggggtctccccatgcgagagtagggaactgccaggcatcaaataaaacgaaaggctcagtcgaaagactgggcctttcgttttatctgttgtttgtcggtgaacgctctcctgagtaggacaaatccgccgggagcggatttgaacgttgcgaagcaacggcccggagggtggcgggcaggacgcccgccataaactgccaggcatcaaattaagcagaaggccatcctgacggatggcctttttgcgtttctacaaactcttttgtttatttttctaaatacattcaaatatgtatccgctcatgaccaaaatcccttaacgtgagttttcgttccactgagcgtcagaccccgtagaaaagatcaaaggatcttcttgagatcctttttttctgcgcgtaatctgctgcttgcaaacaaaaaaaccaccgctaccagcggtggtttgtttgccggatcaagagctaccaactctttttccgaaggtaactggcttcagcagagcgcagataccaaatactgtccttctagtgtagccgtagttaggccaccacttcaagaactctgtagcaccgcctacatacctcgctctgctaatcctgttaccagtggctgctgccagtggcgataagtcgtgtcttaccgggttggactcaagacgatagttaccggataaggcgcagcggtcgggctgaacggggggttcgtgcacacagcccagcttggagcgaacgacctacaccgaactgagatacctacagcgtgagctatgagaaagcgccacgcttcccgaagggagaaaggcggacaggtatccggtaagcggcagggtcggaacaggagagcgcacgagggagcttccagggggaaacgcctggtatctttatagtcctgtcgggtttcgccacctctgacttgagcgtcgatttttgtgatgctcgtcaggggggcggagcctatggaaaaacgccagcaacgcggcctttttacggttcctggccttttgctggccttttgctcacatgttctttcctgcgttatcccctgattctgtggataaccgtattaccgcctttgagtgagctgataccgctcgccgcagccgaacgaccgagcgcagcgagtcagtgagcgaggaagcggaagagcgcctgatgcggtattttctccttacgcatctgtgcggtatttcacaccgcatatggtgcactctcagtacaatctgctctgatgccgcatagttaagccagtatacactccgctatcgctacgtgactgggtcatggctgcgccccgacacccgccaacacccgctgacgcgccctgacgggcttgtctgctcccggcatccgcttacagacaagctgtgaccgtctccgggagctgcatgtgtcagaggttttcaccgtcatcaccgaaacgcgcgaggcagcagatcaattcgcgcgcgaaggcgaagcggcatgcataatgtgcctgtcaaatggacgaagcagggattctgcaaaccctatgctactccgtcaagccgtcaattgtctgattcgttaccaattatgacaacttgacggctacatcattcactttttcttcacaaccggcacggaactcgctcgggctggccccggtgcattttttaaatacccgcgagaaatagagttgatcgtcaaaaccaacattgcgaccgacggtggcgataggcatccgggtggtgctcaaaagcagcttcgcctggctgatacgttggtcctcgcgccagcttaagacgctaatccctaactgctggcggaaaagatgtgacagacgcgacggcgacaagcaaacatgctgtgcgacgctggcgat

SEQ ID NO: 91 - protein, 532 aa, Artificial Sequence
  Description of Artificial Sequence: Synthetic polypeptide
MALPVTALLLPLALLLHAARPGSQVQLQQSGPELEKPGASVKISCKASGYSFTGYTMNWVKQSHGKSLEWIGLITPYNGASSYNQKFRGKATLTVDKSSSTAYMDLLSLTSEDSAVYFCARGGYDGRGFDYWGQGTTVTVSSGGGGSGGGGSSGGGSDIELTQSPAIMSASPGEKVTMTCSASSSVSYMHWYQQKSGTSPKRWIYDTSKLASGVPGRFSGSGSGNSYSLTISSVEAEDDATYYCQQWSKHPLTYGAGTKLEIKASTTTPAPRPPTPAPTIASQPLSLRPEACRPAAGGAVHTRGLDFACDFWVLVVVGGVLACYSLLVTVAFIIFWVRSKRSRLLHSDYMNMTPRRPGPTRKHYQPYAPPRDFAAYRSKRGRKKLLYIFKQPFMRPVQTTQEEDGCSCRFPEEEEGGCELRVKFSRSADAPAYKQGQNQLYNELNLGRREEYDVLDKRRGRDPEMGGKPRRKNPQEGLYNELQKDKMAEAYSEIGMKGERRRGKGHDGLYQGLSTATKDTYDALHMQALPPR
